United States Patent Application Publication US 2025/0327063 A1 - sequence listing, part 10

SEQ ID NO: 139366 - DNA, 80 bp, synthetic construct; identical to SEQ ID NO: 43653
  misc_feature 1..80: note = Artificially Synthesized Probe
  source 1..80: mol_type = other DNA

SEQ ID NO: 139367 - DNA, 80 bp, synthetic construct
  misc_feature 1..80: note = Artificially Synthesized Probe
  source 1..80: mol_type = other DNA
gtatttttgaagggaactggaccatgaaaacacagtttgtttgtcacccataaggcgtagaaatgcatatactgaaaaga

SEQ ID NO: 139368 - DNA, 80 bp, synthetic construct
  misc_feature 1..80: note = Artificially Synthesized Probe
  source 1..80: mol_type = other DNA
cagctgcaaagctaaaaactaatgttggaagaacgaagtcatggactatttcccgtgaagtaactagaatgaagccctta

SEQ ID NO: 139369 - DNA, 80 bp, synthetic construct; identical to SEQ ID NO: 43654
  misc_feature 1..80: note = Artificially Synthesized Probe
  source 1..80: mol_type = other DNA

SEQ ID NO: 139370 - DNA, 80 bp, synthetic construct
  misc_feature 1..80: note = Artificially Synthesized Probe
  source 1..80: mol_type = other DNA
atacgaggcgcctgtagaaatgtgtttagtgtttagttcttttgattaaagtgctgcttgatatttacatcccaccaaag

SEQ ID NO: 139371 - DNA, 80 bp, synthetic construct
  misc_feature 1..80: note = Artificially Synthesized Probe
  source 1..80: mol_type = other DNA
ggattccttagctgagaagtatagttcatcactgactgttctattacctgacagcaattgataaagtatccatgcacaaa

SEQ ID NO: 139372 - DNA, 80 bp, synthetic construct
  misc_feature 1..80: note = Artificially Synthesized Probe
  source 1..80: mol_type = other DNA
acagatgtttaactaaatacaaaaagccctaaatgtgcagtgactctgaacctgtgacttgaattcagtattttaatatg

SEQ ID NO: 139373 - DNA, 80 bp, synthetic construct
  misc_feature 1..80: note = Artificially Synthesized Probe
  source 1..80: mol_type = other DNA
taaacaaactatataattagcagagaaggggggaagcctctgtttacttttaaaggagttccaaagaagcagtttgagtg

SEQ ID NO: 139374 - DNA, 80 bp, synthetic construct; identical to SEQ ID NO: 43655
  misc_feature 1..80: note = Artificially Synthesized Probe
  source 1..80: mol_type = other DNA

SEQ ID NO: 139375 - DNA, 80 bp, synthetic construct
  misc_feature 1..80: note = Artificially Synthesized Probe
  source 1..80: mol_type = other DNA
actctccacctgcatttgagatttttaaaagcgggagttggactttatttctgcaaaagatctaatgaaaagtcttatgc

SEQ ID NO: 139376 - DNA, 80 bp, synthetic construct
  misc_feature 1..80: note = Artificially Synthesized Probe
  source 1..80: mol_type = other DNA
tattgtgcttatttagagaaaagacagagtttggcttctcaaaaaggagcatacattgcctggaaaattactctcagagc

SEQ ID NO: 139377 - DNA, 80 bp, synthetic construct
  misc_feature 1..80: note = Artificially Synthesized Probe
  source 1..80: mol_type = other DNA
ataggacagatttggaaatccatgtgaaaaggtgccatgccagagagatgaaattttactgccgtacttgtgacttctct

SEQ ID NO: 139378 - DNA, 80 bp, synthetic construct
  misc_feature 1..80: note = Artificially Synthesized Probe
  source 1..80: mol_type = other DNA
gaaatatcagtgtcgaatgaacctaattctttatacacatctgctttctttatctttaacaggtttgtccttattttttt

SEQ ID NO: 139379 - DNA, 80 bp, synthetic construct; identical to SEQ ID NO: 43656
  misc_feature 1..80: note = Artificially Synthesized Probe
  source 1..80: mol_type = other DNA

SEQ ID NO: 139380 - DNA, 80 bp, synthetic construct
  misc_feature 1..80: note = Artificially Synthesized Probe
  source 1..80: mol_type = other DNA
tatctagaggtacataacagaaaagcaatgaattacatatgcaagaaaaaccttttatataacaaaccaaagtggaaaaa

SEQ ID NO: 139381 - DNA, 80 bp, synthetic construct
  misc_feature 1..80: note = Artificially Synthesized Probe
  source 1..80: mol_type = other DNA
ccatccccaggaaaagctaaccacatttttcgcagcactctctttgtgctttgagatactctgtttgtgcatgtttgatt

SEQ ID NO: 139382 - DNA, 80 bp, synthetic construct
  misc_feature 1..80: note = Artificially Synthesized Probe
  source 1..80: mol_type = other DNA
ttgaaaacattaatatatattttagaacaatttatatttgtctttcttttttctttcttagattgaaactgaaaactgac

SEQ ID NO: 139383 - DNA, 80 bp, synthetic construct; identical to SEQ ID NO: 43657
  misc_feature 1..80: note = Artificially Synthesized Probe
  source 1..80: mol_type = other DNA

SEQ ID NO: 139384 - DNA, 80 bp, synthetic construct
  misc_feature 1..80: note = Artificially Synthesized Probe
  source 1..80: mol_type = other DNA
cctaacagatgaccgcctcctgttccacaccagactatgctgaaaccgttcagttcaccaagaaattaccctattttttc

SEQ ID NO: 139385 - DNA, 80 bp, synthetic construct
  misc_feature 1..80: note = Artificially Synthesized Probe
  source 1..80: mol_type = other DNA
taaaaatattatgaagtaagagggcccaagttcatgatgttttccatgccaccttcagctgagctgcttcttacttgcac

SEQ ID NO: 139386 - DNA, 80 bp, synthetic construct
  misc_feature 1..80: note = Artificially Synthesized Probe
  source 1..80: mol_type = other DNA
aatgcaggttctagtgcacactgagcgcctgccagagaacaaaacatcggctgctctctcccctcggagggaggaggcat

SEQ ID NO: 139387 - DNA, 80 bp, synthetic construct; identical to SEQ ID NO: 43658
  misc_feature 1..80: note = Artificially Synthesized Probe
  source 1..80: mol_type = other DNA

SEQ ID NO: 139388 - DNA, 80 bp, synthetic construct
  misc_feature 1..80: note = Artificially Synthesized Probe
  source 1..80: mol_type = other DNA
cttgtaatctgttctttttgtctgaaaaagatgtggaagaacacaaagccaccgagaagcatattaattcattggttcaa

SEQ ID NO: 139389 - DNA, 80 bp, synthetic construct
  misc_feature 1..80: note = Artificially Synthesized Probe
  source 1..80: mol_type = other DNA
attaagcatcaaacacaacagcagaacccaggatacttgtctccgggccttcattgggcaggagcctgtggaaagtagga

SEQ ID NO: 139390 - DNA, 80 bp, synthetic construct
  misc_feature 1..80: note = Artificially Synthesized Probe
  source 1..80: mol_type = other DNA
gctcagtagcggcttttttcactttatgtgccatgggagtatcatatcttactgttatttattgtaacctgctgctcgtt

SEQ ID NO: 139391 - DNA, 80 bp, synthetic construct
  misc_feature 1..80: note = Artificially Synthesized Probe
  source 1..80: mol_type = other DNA
gacatcagctttgcagtttcgattctatggaaatcatgagtctagttctgaattctaatgcagtaaatgttgaatccccg

SEQ ID NO: 139392 - DNA, 80 bp, synthetic construct
  misc_feature 1..80: note = Artificially Synthesized Probe
  source 1..80: mol_type = other DNA
tatttaagaaaatatgctgggagtttaaaataagcttgtgtaagaatgctatgtaaaaatacagataactaattagaaat

SEQ ID NO: 139393 - DNA, 80 bp, synthetic construct; identical to SEQ ID NO: 43659
  misc_feature 1..80: note = Artificially Synthesized Probe
  source 1..80: mol_type = other DNA

SEQ ID NO: 139394 - DNA, 80 bp, synthetic construct
  misc_feature 1..80: note = Artificially Synthesized Probe
  source 1..80: mol_type = other DNA
ttataatgaatggttggaaatttgtaaaaagtagaggcatattagcaaatgaaaagcccttcgaactatgagctagtggg

SEQ ID NO: 139395 - DNA, 80 bp, synthetic construct
  misc_feature 1..80: note = Artificially Synthesized Probe
  source 1..80: mol_type = other DNA
acaaataatgctagatcacaaccctaatctcctggtaatctctttcatggttttcatttgttcacgtctttgagattatg

SEQ ID NO: 139396 - DNA, 80 bp, synthetic construct
  misc_feature 1..80: note = Artificially Synthesized Probe
  source 1..80: mol_type = other DNA
gaacaaagcctgaatccttaaaggttattttttacaggagattgggggtgcttctgtggataagcagtggtattccctgc

SEQ ID NO: 139397 - DNA, 80 bp, synthetic construct
  misc_feature 1..80: note = Artificially Synthesized Probe
  source 1..80: mol_type = other DNA
catgtgtatgcatcccaagtctcttggcatgatgtcttactcatagaagggggtgttaggccattcttgcattgcctaaa

SEQ ID NO: 139398 - DNA, 80 bp, synthetic construct; identical to SEQ ID NO: 43660
  misc_feature 1..80: note = Artificially Synthesized Probe
  source 1..80: mol_type = other DNA

SEQ ID NO: 139399 - DNA, 80 bp, synthetic construct
  misc_feature 1..80: note = Artificially Synthesized Probe
  source 1..80: mol_type = other DNA
gtgcccaagaagggctgactgacaatgatcttggaaatgtccagctcacgtcttccaaagctgcctgctgccgatccaaa

SEQ ID NO: 139400 - DNA, 80 bp, synthetic construct
  misc_feature 1..80: note = Artificially Synthesized Probe
  source 1..80: mol_type = other DNA
attccagtaagcctcagtttcagtgtaagaagtgtttttataaaacaagatcttctactgttctcacgagacatataaag

SEQ ID NO: 139401 - DNA, 80 bp, synthetic construct
  misc_feature 1..80: note = Artificially Synthesized Probe
  source 1..80: mol_type = other DNA
cttgttttcattatttctgctgctcacatggaggtcaatgccctcttgaacagtagcatagaccttatttagaagtctca

SEQ ID NO: 139402 - DNA, 80 bp, synthetic construct
  misc_feature 1..80: note = Artificially Synthesized Probe
  source 1..80: mol_type = other DNA
caaaatcattacgataacattgccacttctgtaaatgaaagcttctgtagggcatttcctgcctgtctgttttgctgcgc

SEQ ID NO: 139403 - DNA, 80 bp, synthetic construct
  misc_feature 1..80: note = Artificially Synthesized Probe
  source 1..80: mol_type = other DNA
agctttagaaacttctttaatgattttgttttgaccttttgctactgcctttactgggaccgaattgattgtctcaactg

SEQ ID NO: 139404 - DNA, 80 bp, synthetic construct; identical to SEQ ID NO: 43661
  misc_feature 1..80: note = Artificially Synthesized Probe
  source 1..80: mol_type = other DNA

SEQ ID NO: 139405 - DNA, 80 bp, synthetic construct
  misc_feature 1..80: note = Artificially Synthesized Probe
  source 1..80: mol_type = other DNA
tcttggtttcttgactcattaagtcaacattgtccctctgttgatttgcctaaactgttttgcacagagatcttgtagaa

SEQ ID NO: 139406 - DNA, 80 bp, synthetic construct
  misc_feature 1..80: note = Artificially Synthesized Probe
  source 1..80: mol_type = other DNA
tcattgattgcatgcctttgacacactgctttgctgctgcttccttgatcatcatcatagcatccctagattgcttaact

SEQ ID NO: 139407 - DNA, 80 bp, synthetic construct
  misc_feature 1..80: note = Artificially Synthesized Probe
  source 1..80: mol_type = other DNA
tattaatttttagaaataacttactttctaaatgaaaagtaaaataagataatttctaagattatgatttttggaatatt

SEQ ID NO: 139408 - DNA, 80 bp, synthetic construct; identical to SEQ ID NO: 43662
  misc_feature 1..80: note = Artificially Synthesized Probe
  source 1..80: mol_type = other DNA

SEQ ID NO: 139409 - DNA, 80 bp, synthetic construct
  misc_feature 1..80: note = Artificially Synthesized Probe
  source 1..80: mol_type = other DNA
atactctctatgaacctttggtagctaatgagtatcttgcaattggcctgtgctgggcactgtgctctatgccatccctg

SEQ ID NO: 139410 - DNA, 80 bp, synthetic construct
  misc_feature 1..80: note = Artificially Synthesized Probe
  source 1..80: mol_type = other DNA
tcctggagacagaggctaaccctcagggaaagatagatgataagtaaataaactaactactgtgcatggtaatgccatgt

SEQ ID NO: 139411 - DNA, 80 bp, synthetic construct; identical to SEQ ID NO: 43319
  misc_feature 1..80: note = Artificially Synthesized Probe
  source 1..80: mol_type = other DNA

SEQ ID NO: 139412 - DNA, 80 bp, synthetic construct
  misc_feature 1..80: note = Artificially Synthesized Probe
  source 1..80: mol_type = other DNA
ttaaagtgtacagtgtgatgtgttttgacagaagtataaacccttgaaaccatggccataattaaaataatgaacacatc

SEQ ID NO: 139413 - DNA, 80 bp, synthetic construct; identical to SEQ ID NO: 43663
  misc_feature 1..80: note = Artificially Synthesized Probe
  source 1..80: mol_type = other DNA

SEQ ID NO: 139414 - DNA, 80 bp, synthetic construct
  misc_feature 1..80: note = Artificially Synthesized Probe
  source 1..80: mol_type = other DNA
tggcaagagagagtgatcacttgaatgagggtagtggaggtgatgaaaatggttggattcaggatgtccttgtcaagggg

SEQ ID NO: 139415 - DNA, 80 bp, synthetic construct
  misc_feature 1..80: note = Artificially Synthesized Probe
  source 1..80: mol_type = other DNA
ctttaatttggtggctttgtacatctgccgtgtatgtctgcttacgttgtatcatggccatcttttctctgcaggcatcc

SEQ ID NO: 139416 - DNA, 80 bp, synthetic construct
  misc_feature 1..80: note = Artificially Synthesized Probe
  source 1..80: mol_type = other DNA
cccacactccgtaacgctaggcttcgtttagagaggagcttttcaactcttgttagatgtcctaaattgtacttaattga

SEQ ID NO: 139417 - DNA, 80 bp, synthetic construct; identical to SEQ ID NO: 43664
  misc_feature 1..80: note = Artificially Synthesized Probe
  source 1..80: mol_type = other DNA

SEQ ID NO: 139418 - DNA, 80 bp, synthetic construct
  misc_feature 1..80: note = Artificially Synthesized Probe
  source 1..80: mol_type = other DNA
tgcacgtggacacacacttttacatacccacataaatgtattttacacatattttagtcattgtggtacctcaattgact

SEQ ID NO: 139419 - DNA, 80 bp, synthetic construct
  misc_feature 1..80: note = Artificially Synthesized Probe
  source 1..80: mol_type = other DNA
catttggctcacttaagataatctcaaaaaccaacttacccagaaacagttacttgggagaaacagacaaaatgttactt

SEQ ID NO: 139420 - DNA, 80 bp, synthetic construct
  misc_feature 1..80: note = Artificially Synthesized Probe
  source 1..80: mol_type = other DNA
gatataaaataaaaaatgttgggcaaaggagaaaataatatgaaagttttcattgttgtttattaggaaatcagtccttt

SEQ ID NO: 139421 - DNA, 80 bp, synthetic construct
  misc_feature 1..80: note = Artificially Synthesized Probe
  source 1..80: mol_type = other DNA
tatttttatatttacattttagattatgagtgtatgaaaccgcaacacacaggggaaggggtattcctaaactattgtcc

SEQ ID NO: 139422 - DNA, 80 bp, synthetic construct
  misc_feature 1..80: note = Artificially Synthesized Probe
  source 1..80: mol_type = other DNA
ggtaacatctcacggacgtgttcacactgtggccttttggcctctagtattacaaacttgactgttcacattagacgaaa

SEQ ID NO: 139423 - DNA, 80 bp, synthetic construct; identical to SEQ ID NO: 43665
  misc_feature 1..80: note = Artificially Synthesized Probe
  source 1..80: mol_type = other DNA

SEQ ID NO: 139424 - DNA, 80 bp, synthetic construct
  misc_feature 1..80: note = Artificially Synthesized Probe
  source 1..80: mol_type = other DNA
tcgtttagggatgggctgagctgcagaagttgtggggaccgcaagtccagaggaactggagagaaactgaaggagagtgt

SEQ ID NO: 139425 - DNA, 80 bp, synthetic construct
  misc_feature 1..80: note = Artificially Synthesized Probe
  source 1..80: mol_type = other DNA
aaaggaaaagttgcaaaccccagaatcagcatttaaggatgagccagtagccaacagggagatgaatcaggaaaatagct

SEQ ID NO: 139426 - DNA, 80 bp, synthetic construct
  misc_feature 1..80: note = Artificially Synthesized Probe
  source 1..80: mol_type = other DNA
gcaaaaatttcaatgaaataatgttccaaataccccaagtaaccctgttttccaaggtggtgataactaagtgggtaccc

SEQ ID NO: 139427 - DNA, 80 bp, synthetic construct; identical to SEQ ID NO: 43666
  misc_feature 1..80: note = Artificially Synthesized Probe
  source 1..80: mol_type = other DNA

SEQ ID NO: 139428 - DNA, 80 bp, synthetic construct
  misc_feature 1..80: note = Artificially Synthesized Probe
  source 1..80: mol_type = other DNA
ccaccccttttacttcatcttgaaaagttgcttctttcctaaacttcaggtcaaaaatgaatccccagcctccagcttaa

SEQ ID NO: 139429 - DNA, 80 bp, synthetic construct
  misc_feature 1..80: note = Artificially Synthesized Probe
  source 1..80: mol_type = other DNA
tgtgcccacaacagagaccctgctcttgacgtcctctattccaaggggataataaggtttttggcagccattctgtttta

SEQ ID NO: 139430 - DNA, 80 bp, synthetic construct
  misc_feature 1..80: note = Artificially Synthesized Probe
  source 1..80: mol_type = other DNA
tgacataatatgtgcagcaagcattacattgctgctgatgttgagatgaaggtttgtatcagtgggtgtcgtgatgtgat

SEQ ID NO: 139431 - DNA, 80 bp, synthetic construct; identical to SEQ ID NO: 43667
  misc_feature 1..80: note = Artificially Synthesized Probe
  source 1..80: mol_type = other DNA

SEQ ID NO: 139432 - DNA, 80 bp, synthetic construct
  misc_feature 1..80: note = Artificially Synthesized Probe
  source 1..80: mol_type = other DNA
aaagctacttgtgaagccaagttataatcagaatgttgctttctgagtttaaaaccagaagagagtaagtgagttgaact

SEQ ID NO: 139433 - DNA, 80 bp, synthetic construct
  misc_feature 1..80: note = Artificially Synthesized Probe
  source 1..80: mol_type = other DNA
ggtagccttgaagctggtaaaaagaatgctggctcagcagtgaccatgtcagatgaacatgctaacaaaccagctgagtc

SEQ ID NO: 139434 - DNA, 80 bp, synthetic construct
  misc_feature 1..80: note = Artificially Synthesized Probe
  source 1..80: mol_type = other DNA
gttgccttttctcatgccccgtgaggttgtcgttcttcgctttccctatcctacaattgtcagttctaccatgggggcaa

SEQ ID NO: 139435 - DNA, 80 bp, synthetic construct; identical to SEQ ID NO: 43668
  misc_feature 1..80: note = Artificially Synthesized Probe
  source 1..80: mol_type = other DNA

SEQ ID NO: 139436 - DNA, 80 bp, synthetic construct
  misc_feature 1..80: note = Artificially Synthesized Probe
  source 1..80: mol_type = other DNA
ttttattcactgaataatttcaaggtgagttctattatgagaggaaggaaggtagacagtgccgtaatgggaagctcttt

SEQ ID NO: 139437 - DNA, 80 bp, synthetic construct
  misc_feature 1..80: note = Artificially Synthesized Probe
  source 1..80: mol_type = other DNA
cttctaggggaaagtgatgatttgtggtttttgatgaagagtttagaatgcctttcccacctctgcttccttgttacctg

SEQ ID NO: 139438 - DNA, 80 bp, synthetic construct
  misc_feature 1..80: note = Artificially Synthesized Probe
  source 1..80: mol_type = other DNA
ttacactgtgaagtggtctaaaaatgttcgtcttcacctacgagactctggacgtctttgagtattcattccttcattct

SEQ ID NO: 139439 - DNA, 80 bp, synthetic construct; identical to SEQ ID NO: 43669
  misc_feature 1..80: note = Artificially Synthesized Probe
  source 1..80: mol_type = other DNA

SEQ ID NO: 139440 - DNA, 80 bp, synthetic construct
  misc_feature 1..80: note = Artificially Synthesized Probe
  source 1..80: mol_type = other DNA
atatacacacctgagctgcattgggtttgacgaggagtccgccatgcatacacctgagacacaagctatgcaggcagagg

SEQ ID NO: 139441 - DNA, 80 bp, synthetic construct
  misc_feature 1..80: note = Artificially Synthesized Probe
  source 1..80: mol_type = other DNA
tcaaagattttagcagaggtcttggttcctcatcattttcagtgaggaagtcactgggcatgtgacttctaagaggaagg

SEQ ID NO: 139442 - DNA, 80 bp, synthetic construct
  misc_feature 1..80: note = Artificially Synthesized Probe
  source 1..80: mol_type = other DNA
acttactgaacattttctgagaccaggacttgagaatgtttgtatataacctacttttcataaagtctagtctttcatct

SEQ ID NO: 139443 - DNA, 80 bp, synthetic construct; identical to SEQ ID NO: 43670
  misc_feature 1..80: note = Artificially Synthesized Probe
  source 1..80: mol_type = other DNA

SEQ ID NO: 139444 - DNA, 80 bp, synthetic construct
  misc_feature 1..80: note = Artificially Synthesized Probe
  source 1..80: mol_type = other DNA
acaatttcccctttttaacttgcatgcaaccatcatgccattgaacttgtatgtgtctgtctttctgagtttattctttg

SEQ ID NO: 139445 - DNA, 80 bp, synthetic construct
  misc_feature 1..80: note = Artificially Synthesized Probe
  source 1..80: mol_type = other DNA
tactcccagagagatgttacaggcacaggtgagaataagtgtttgcactgtgagtttagtgctcactcctctgcttctct

SEQ ID NO: 139446 - DNA, 80 bp, synthetic construct
  misc_feature 1..80: note = Artificially Synthesized Probe
  source 1..80: mol_type = other DNA
aatgcctttgttatccttccaggcaagatcttcccagcacacttctactttaattagcttgatttcagcacagtttgtaa

SEQ ID NO: 139447 - DNA, 80 bp, synthetic construct
  misc_feature 1..80: note = Artificially Synthesized Probe
  source 1..80: mol_type = other DNA
gtcatcctatgttgttgaaatgagtagacatttctatgggagttgcatccaacagtgtggcttctttatgcaaacttcag

SEQ ID NO: 139448 - DNA, 80 bp, synthetic construct; identical to SEQ ID NO: 43671
  misc_feature 1..80: note = Artificially Synthesized Probe
  source 1..80: mol_type = other DNA

SEQ ID NO: 139449 - DNA, 80 bp, synthetic construct
  misc_feature 1..80: note = Artificially Synthesized Probe
  source 1..80: mol_type = other DNA
ggtcctgagtgagtgcttggtggagggataggagaaggtcctgagtgaggactgggtggagggataggagaaggtcccga

SEQ ID NO: 139450 - DNA, 80 bp, synthetic construct
  misc_feature 1..80: note = Artificially Synthesized Probe
  source 1..80: mol_type = other DNA
gggataggagaaggtcttgagtcagtgctgggtggagggataggagaaggtcctgagtcagtgctgggtggagggatagg

SEQ ID NO: 139451 - DNA, 80 bp, synthetic construct
  misc_feature 1..80: note = Artificially Synthesized Probe
  source 1..80: mol_type = other DNA
gtgctgggtggagggataggagaaagtcctgagtcagtgctgggtggagggataggagaaggtcctgagtgtggactggg

SEQ ID NO: 139452 - DNA, 80 bp, synthetic construct
  misc_feature 1..80: note = Artificially Synthesized Probe
  source 1..80: mol_type = other DNA
ggtcctgagcgaggactgggtggagggataggagaaggtgctgctttcccattttacatcttctctagtttatagcctct

SEQ ID NO: 139453 - DNA, 80 bp, synthetic construct; identical to SEQ ID NO: 43672
  misc_feature 1..80: note = Artificially Synthesized Probe
  source 1..80: mol_type = other DNA

SEQ ID NO: 139454 - DNA, 80 bp, synthetic construct; identical to SEQ ID NO: 43320
  misc_feature 1..80: note = Artificially Synthesized Probe
  source 1..80: mol_type = other DNA

SEQ ID NO: 139455 - DNA, 80 bp, synthetic construct
  misc_feature 1..80: note = Artificially Synthesized Probe
  source 1..80: mol_type = other DNA
ttgagaccagcctgggcaacatgatgaaaccccatctctacaaaaaatacaaaaaattagctgggtgtggtgacgcgtgc

SEQ ID NO: 139456 - DNA, 80 bp, synthetic construct
  misc_feature 1..80: note = Artificially Synthesized Probe
  source 1..80: mol_type = other DNA
tgcagtagaatgaggtttctgtggtttttagctgggttgagaaatgtgttcaccaatcttgaacatgtgaattacccacc

SEQ ID NO: 139457 - DNA, 80 bp, synthetic construct
  misc_feature 1..80: note = Artificially Synthesized Probe
  source 1..80: mol_type = other DNA
taatcaaaactagttttcatggaagtttagaaggccatttcctttagccatttcctttgttttcattattcatttaataa

SEQ ID NO: 139458 - DNA, 80 bp, synthetic construct; identical to SEQ ID NO: 43673
  misc_feature 1..80: note = Artificially Synthesized Probe
  source 1..80: mol_type = other DNA

SEQ ID NO: 139459 - DNA, 80 bp, synthetic construct
  misc_feature 1..80: note = Artificially Synthesized Probe
  source 1..80: mol_type = other DNA
acatttcctaggtgtctctgtgggaatggatgggcctaggccctttgtgaactgacccccgccactcttgggctcattcc

SEQ ID NO: 139460 - DNA, 80 bp, synthetic construct
  misc_feature 1..80: note = Artificially Synthesized Probe
  source 1..80: mol_type = other DNA
ctgattccaagagtcaattctgaaacccttctgagtggacacagtgccctacctacctcccttcagcacttacgtgctct

SEQ ID NO: 139461 - DNA, 80 bp, synthetic construct; identical to SEQ ID NO: 43674
  misc_feature 1..80: note = Artificially Synthesized Probe
  source 1..80: mol_type = other DNA

SEQ ID NO: 139462 - DNA, 80 bp, synthetic construct
  misc_feature 1..80: note = Artificially Synthesized Probe
  source 1..80: mol_type = other DNA
ctgcaacaaaccattgggttatgcattgcctttaaatatccagttcactccatatctgacttttcacattatttgtaata

SEQ ID NO: 139463 - DNA, 80 bp, synthetic construct
  misc_feature 1..80: note = Artificially Synthesized Probe
  source 1..80: mol_type = other DNA
cctgcaggttatcgggtggtaatattttcagagcatcatgttagtaatccttacgcccttgttacctttcttggtcaaac

SEQ ID NO: 139464 - DNA, 80 bp, synthetic construct
  misc_feature 1..80: note = Artificially Synthesized Probe
  source 1..80: mol_type = other DNA
ctaaagtgctctgcgctgctgactctgtagaagttgagactgaagaagaatctaatttcaatgaagaccattccttttgt

SEQ ID NO: 139465 - DNA, 80 bp, synthetic construct
  misc_feature 1..80: note = Artificially Synthesized Probe
  source 1..80: mol_type = other DNA
aggaaatgttcattgaaagcaaattattccacattttattgtttttacattcagctttttaaacaacactattataaaac

SEQ ID NO: 139466 - DNA, 80 bp, synthetic construct
  misc_feature 1..80: note = Artificially Synthesized Probe
  source 1..80: mol_type = other DNA
gtaaacatattagcaaagtgtctatttcttagttgagtttgaattgctcttcagaaagagaagcagctgctattaacagg

SEQ ID NO: 139467 - DNA, 80 bp, synthetic construct; identical to SEQ ID NO: 43675
  misc_feature 1..80: note = Artificially Synthesized Probe
  source 1..80: mol_type = other DNA

SEQ ID NO: 139468 - DNA, 80 bp, synthetic construct
  misc_feature 1..80: note = Artificially Synthesized Probe
  source 1..80: mol_type = other DNA
atcagctttatgccctctcaggatttggggtggttggcaataaaatcactaagcaaatgaatgaagaaaaatctgatgat

SEQ ID NO: 139469 - DNA, 80 bp, synthetic construct
  misc_feature 1..80: note = Artificially Synthesized Probe
  source 1..80: mol_type = other DNA
ttttttgggtcttctgaaccaatattataaccaaacttttaaattgttgtcttttttctttttcatttcctggttttaaa

SEQ ID NO: 139470 - DNA, 80 bp, synthetic construct
  misc_feature 1..80: note = Artificially Synthesized Probe
  source 1..80: mol_type = other DNA
acctggggtgggtgtctgctccctaccctccctttagatgtctgctaaaattcagagcctatgtgaaaaactagaatggc

SEQ ID NO: 139471 - DNA, 80 bp, synthetic construct; identical to SEQ ID NO: 43676
  misc_feature 1..80: note = Artificially Synthesized Probe
  source 1..80: mol_type = other DNA

SEQ ID NO: 139472 - DNA, 80 bp, synthetic construct
  misc_feature 1..80: note = Artificially Synthesized Probe
  source 1..80: mol_type = other DNA
tcagccccaggtaaccatcattctgtcaactgtctccatgagttcaattgttttaatttttagatcccacaaataaatga

SEQ ID NO: 139473 - DNA, 80 bp, synthetic construct
  misc_feature 1..80: note = Artificially Synthesized Probe
  source 1..80: mol_type = other DNA
tctgccttaaattgtgagacagcaaagaaaaaccatgagatatcgaatgatgcaggtgagctgcgtgtccattgtgaggg

SEQ ID NO: 139474 - DNA, 80 bp, synthetic construct
  misc_feature 1..80: note = Artificially Synthesized Probe
  source 1..80: mol_type = other DNA
actccattgtatatatctactgcattttctttattcatttgtcatctgttgatggacacttaggttgcttccaaatcctg

SEQ ID NO: 139475 - DNA, 80 bp, synthetic construct; identical to SEQ ID NO: 43677
  misc_feature 1..80: note = Artificially Synthesized Probe
  source 1..80: mol_type = other DNA

SEQ ID NO: 139476 - DNA, 80 bp, synthetic construct
  misc_feature 1..80: note = Artificially Synthesized Probe
  source 1..80: mol_type = other DNA
tttaaaatcagattattagatttttttccttaagagttgtttgagcttctcatatattctggttattaatcccttgtcag

SEQ ID NO: 139477 - DNA, 80 bp, synthetic construct
  misc_feature 1..80: note = Artificially Synthesized Probe
  source 1..80: mol_type = other DNA
gcccagaccagtgtcctagagagtttccccagtgttttcttgtagtactttcatagtttgaggtcttagatttaagtctt

SEQ ID NO: 139478 - DNA, 80 bp, synthetic construct
  misc_feature 1..80: note = Artificially Synthesized Probe
  source 1..80: mol_type = other DNA
ggtatgtggatttgtttctgggttctgtattctgttccctgggtctgtgtgtctgtttttatgccaataccatgctgttt

SEQ ID NO: 139479 - DNA, 80 bp, synthetic construct
  misc_feature 1..80: note = Artificially Synthesized Probe
  source 1..80: mol_type = other DNA
tagagattgcatagaatctgtagattgttttgggtgatatggacattataacaatattgatttttccaatccatgaatgt

SEQ ID NO: 139480 - DNA, 80 bp, synthetic construct; identical to SEQ ID NO: 43678
  misc_feature 1..80: note = Artificially Synthesized Probe
  source 1..80: mol_type = other DNA

SEQ ID NO: 139481 - DNA, 80 bp, synthetic construct
  misc_feature 1..80: note = Artificially Synthesized Probe
  source 1..80: mol_type = other DNA
agtaattgtgctgctgcactccatcctgggcgacagagaccctaacacgaaaaaagaaagaaagaaagacggatttgttt

SEQ ID NO: 139482 - DNA, 80 bp, synthetic construct
  misc_feature 1..80: note = Artificially Synthesized Probe
  source 1..80: mol_type = other DNA
tgcagttttagtacttaaaaattgcctcttgtttctgacagtgaattattgtatggaaacgtgggtcttttttctttctg

SEQ ID NO: 139483 - DNA, 80 bp, synthetic construct
  misc_feature 1..80: note = Artificially Synthesized Probe
  source 1..80: mol_type = other DNA
tgcatgctcattagcaaactaactctcacctaatttaactcaatcagcaagtcaaggaacatagaaactgaactgtttta

SEQ ID NO: 139484 - DNA, 80 bp, synthetic construct; identical to SEQ ID NO: 43679
  misc_feature 1..80: note = Artificially Synthesized Probe
  source 1..80: mol_type = other DNA

SEQ ID NO: 139485 - DNA, 80 bp, synthetic construct
  misc_feature 1..80: note = Artificially Synthesized Probe
  source 1..80: mol_type = other DNA
gcacgtgggcatggtttggaagacttgaaaggtgtccaagaagatcccgttctggggaataaggaaattctgatgaattc

SEQ ID NO: 139486 - DNA, 80 bp, synthetic construct
  misc_feature 1..80: note = Artificially Synthesized Probe
  source 1..80: mol_type = other DNA
gtggtcatcataaaggctggggtgctccttttggagtatgtctctttgtatagtttccgtagtgattgctttaggtatta

SEQ ID NO: 139487 - DNA, 80 bp, synthetic construct
  misc_feature 1..80: note = Artificially Synthesized Probe
  source 1..80: mol_type = other DNA
gtttttgcttcaatctcaaatgtgatttataaatctcaaatgtccatgaggaggacagtgggcccccatacttctgcttc

SEQ ID NO: 139488 - DNA, 80 bp, synthetic construct; identical to SEQ ID NO: 43680
  misc_feature 1..80: note = Artificially Synthesized Probe
  source 1..80: mol_type = other DNA

SEQ ID NO: 139489 - DNA, 80 bp, synthetic construct
  misc_feature 1..80: note = Artificially Synthesized Probe
  source 1..80: mol_type = other DNA
tcttgattggcaggtatttgtcgttcaccaaagttgggaggtttgcagcctttaaatactttttttggtgcagcccctcc

SEQ ID NO: 139490 - DNA, 80 bp, synthetic construct
  misc_feature 1..80: note = Artificially Synthesized Probe
  source 1..80: mol_type = other DNA
cgccactccattgtggagcccagccaatgatttttaagatttttattgcattttttcagttctgtaaattccatttgctt

SEQ ID NO: 139491 - DNA, 80 bp, synthetic construct
  misc_feature 1..80: note = Artificially Synthesized Probe
  source 1..80: mol_type = other DNA
tgtctttcctcattcatgttgagattttcctggttcttggtgtgacaggtgattttcattgtatccaggacattttgtct

SEQ ID NO: 139492 - DNA, 80 bp, synthetic construct; identical to SEQ ID NO: 43681
  misc_feature 1..80: note = Artificially Synthesized Probe
  source 1..80: mol_type = other DNA

SEQ ID NO: 139493 - DNA, 80 bp, synthetic construct
  misc_feature 1..80: note = Artificially Synthesized Probe
  source 1..80: mol_type = other DNA
taggctgcttgtggtaactgggtctcttttccacacggaccttggggtaggagtatactgcttatttttcaaccaggcac

SEQ ID NO: 139494 - DNA, 80 bp, synthetic construct; identical to SEQ ID NO: 43321
  misc_feature 1..80: note = Artificially Synthesized Probe
  source 1..80: mol_type = other DNA

SEQ ID NO: 139495 - DNA, 80 bp, synthetic construct
  misc_feature 1..80: note = Artificially Synthesized Probe
  source 1..80: mol_type = other DNA
aggaagtttaatttgacttacagtctggggaggtctcagaatcttataaaactggcgggggtgaaaggcacttctttcat

SEQ ID NO: 139496 - DNA, 80 bp, synthetic construct
  misc_feature 1..80: note = Artificially Synthesized Probe
  source 1..80: mol_type = other DNA
tgggaattctgggagatacagttcaagttaagatttggatggggacacagccaaaccatatcattcctcccctgggccct

SEQ ID NO: 139497 - DNA, 80 bp, synthetic construct
  misc_feature 1..80: note = Artificially Synthesized Probe
  source 1..80: mol_type = other DNA
tacttcctagatacaatgggggtacaggaattgggtaaatacagccattccaaatgggagaaattggccaaaacaaaggg

SEQ ID NO: 139498 - DNA, 80 bp, synthetic construct; identical to SEQ ID NO: 43682
  misc_feature 1..80: note = Artificially Synthesized Probe
  source 1..80: mol_type = other DNA

SEQ ID NO: 139499 - DNA, 80 bp, synthetic construct
  misc_feature 1..80: note = Artificially Synthesized Probe
  source 1..80: mol_type = other DNA
ctggacatgcaggcatttccatacatcttctgaaatctaggcagaggttcccaaacctcagttcttgacttctgtgcact

SEQ ID NO: 139500 - DNA, 80 bp, synthetic construct
  misc_feature 1..80: note = Artificially Synthesized Probe
  source 1..80: mol_type = other DNA
agcccacagaaccattttttgcctctggacctccaggcctgtgatgggaagggctgccatgaggatctctgacatggcct

SEQ ID NO: 139501 - DNA, 80 bp, synthetic construct
  misc_feature 1..80: note = Artificially Synthesized Probe
  source 1..80: mol_type = other DNA
ggctgcaagttttccaaacttttgtgctctgcttcccttataaaactgaatacctttaacagtactcaagtcatctcttg

SEQ ID NO: 139502 - DNA, 80 bp, synthetic construct; identical to SEQ ID NO: 43683
  misc_feature 1..80: note = Artificially Synthesized Probe
  source 1..80: mol_type = other DNA

SEQ ID NO: 139503 - DNA, 80 bp, synthetic construct
  misc_feature 1..80: note = Artificially Synthesized Probe
  source 1..80: mol_type = other DNA
ttttcatgctgctgataaagacatacctgaaactgggaagaaaaagaggtttaatcggacttgcagttccacatggctgt

SEQ ID NO: 139504 - DNA, 80 bp, synthetic construct
  misc_feature 1..80: note = Artificially Synthesized Probe
  source 1..80: mol_type = other DNA
ccatgattcaattacctccctctgggtccctcccacaacatgtgggaattctgggagatacaattcaagttgagatttgg

SEQ ID NO: 139505 - DNA, 80 bp, synthetic construct
  misc_feature 1..80: note = Artificially Synthesized Probe
  source 1..80: mol_type = other DNA
catagccatgaagcatcctacaaaagagaagcacttccattgtttactctgtggaaagtcgttctataccgaaagcaacc

SEQ ID NO: 139506 - DNA, 80 bp, synthetic construct
  misc_feature 1..80: note = Artificially Synthesized Probe
  source 1..80: mol_type = other DNA
ccaccaacaggagatgtgtgaggacaattagctcagtactaggagaaagtagagaggtgttccccactccctttcccctc

SEQ ID NO: 139507 - DNA, 80 bp, synthetic construct; identical to SEQ ID NO: 43684
  misc_feature 1..80: note = Artificially Synthesized Probe
  source 1..80: mol_type = other DNA

SEQ ID NO: 139508 - DNA, 80 bp, synthetic construct
  misc_feature 1..80: note = Artificially Synthesized Probe
  source 1..80: mol_type = other DNA
ccaatcctgctttaaaaaaaatgtatgttagtatggtatatctcattttatccttttactttcaagctacaaatatcatt

SEQ ID NO: 139509 - DNA, 80 bp, synthetic construct
  misc_feature 1..80: note = Artificially Synthesized Probe
  source 1..80: mol_type = other DNA
tgtttgttctgtttttcatttctcagttttctttttcctgcctgcttgcggtttacttgaactttttctagaagtcagtt

SEQ ID NO: 139510 - DNA, 80 bp, synthetic construct
  misc_feature 1..80: note = Artificially Synthesized Probe
  source 1..80: mol_type = other DNA
tcagcattttaccagtttgagcaaagtgtagaaactttgtttccatttgctctccttgaccatctctcatttataaaatt

SEQ ID NO: 139511 - DNA, 80 bp, synthetic construct; identical to SEQ ID NO: 43685
  misc_feature 1..80: note = Artificially Synthesized Probe
  source 1..80: mol_type = other DNA

SEQ ID NO: 139512 - DNA, 80 bp, synthetic construct
  misc_feature 1..80: note = Artificially Synthesized Probe
  source 1..80: mol_type = other DNA
catcataactgaaacaaacatgcgatatgtttgtctgcacaggccgccataacaaaatgagggccttaagcaacagaaat

SEQ ID NO: 139513 - DNA, 80 bp, synthetic construct
  misc_feature 1..80: note = Artificially Synthesized Probe
  source 1..80: mol_type = other DNA
tgtgtgtgtctgtatctgtccaaattttcctgtctttaaaatgacactagacatgttgaattagggagctgcagtactcc

SEQ ID NO: 139514 - DNA, 80 bp, synthetic construct
  misc_feature 1..80: note = Artificially Synthesized Probe
  source 1..80: mol_type = other DNA
atatcccatggcaagagcaggagcgagagagtggggaggtgctatgcacttttaaatagccaggtcacatgggaactcac

SEQ ID NO: 139515 - DNA, 80 bp, synthetic construct
  misc_feature 1..80: note = Artificially Synthesized Probe
  source 1..80: mol_type = other DNA
ataagtattcagatgtatattctgatagctaatatgaaaggaatttgtaagctctacaactgtgcagatgtgcgatggac

SEQ ID NO: 139516 - DNA, 80 bp, synthetic construct; identical to SEQ ID NO: 43686
  misc_feature 1..80: note = Artificially Synthesized Probe
  source 1..80: mol_type = other DNA

SEQ ID NO: 139517 - DNA, 80 bp, synthetic construct
  misc_feature 1..80: note = Artificially Synthesized Probe
  source 1..80: mol_type = other DNA
agaatttatttttacatattaaaggacagcatgaggaattgctgcgggaggtgaataagtatatagtggaagacactgag

SEQ ID NO: 139518 - DNA, 80 bp, synthetic construct
  misc_feature 1..80: note = Artificially Synthesized Probe
  source 1..80: mol_type = other DNA
cccaagtatcaaattacgctcggcaactttacctgattatgttaatcatgctaaatatgaaactgtctttctttgaggca

SEQ ID NO: 139519 - DNA, 80 bp, synthetic construct
  misc_feature 1..80: note = Artificially Synthesized Probe
  source 1..80: mol_type = other DNA
tttgagatcatcagagttcttcatgcaatgaaagttgtgcatctctgatattatcactttaagtatggggtaaatcatta

SEQ ID NO: 139520 - DNA, 80 bp, synthetic construct
  misc_feature 1..80: note = Artificially Synthesized Probe
  source 1..80: mol_type = other DNA
tatcgatctactgatttttatgtacactgtatagaactgccagcagattctgggactgtgcccattaatacatacttacg

SEQ ID NO: 139521 - DNA, 80 bp, synthetic construct; identical to SEQ ID NO: 43687
  misc_feature 1..80: note = Artificially Synthesized Probe
  source 1..80: mol_type = other DNA

SEQ ID NO: 139522 - DNA, 80 bp, synthetic construct
  misc_feature 1..80: note = Artificially Synthesized Probe
  source 1..80: mol_type = other DNA
tatttaccagtgattaaaggtcattcataaagatataagttgtttgatcgaaattctacttctatttgagctttggggat

SEQ ID NO: 139523 - DNA, 80 bp, synthetic construct
  misc_feature 1..80: note = Artificially Synthesized Probe
  source 1..80: mol_type = other DNA
aatagagcctaaagtgatcagcttcagtgagtatactaatgaaaccctgatttttctcatttcaacctgcaaaagggggt

SEQ ID NO: 139524 - DNA, 80 bp, synthetic construct
  misc_feature 1..80: note = Artificially Synthesized Probe
  source 1..80: mol_type = other DNA
ggtcatgacagagaggtttctcctcatgccaatttattgtctctcgttcagctaacttaggagttttctttttttattta

SEQ ID NO: 139525 - DNA, 80 bp, synthetic construct; identical to SEQ ID NO: 43688
  misc_feature 1..80: note = Artificially Synthesized Probe
  source 1..80: mol_type = other DNA

SEQ ID NO: 139526 - DNA, 80 bp, synthetic construct
  misc_feature 1..80: note = Artificially Synthesized Probe
  source 1..80: mol_type = other DNA
ctctgcagcaagccaagtcagtgaggacatggggccatttgttcccatccagatatgcagccctacctgtggctgctcat

SEQ ID NO: 139527 - DNA, 80 bp, synthetic construct
  misc_feature 1..80: note = Artificially Synthesized Probe
  source 1..80: mol_type = other DNA
tacatgccccttttccagttcatctttcttatgctgttatttacagcagtgatgtttgcttctatacgaagctcctttgt

SEQ ID NO: 139528 - DNA, 80 bp, synthetic construct
  misc_feature 1..80: note = Artificially Synthesized Probe
  source 1..80: mol_type = other DNA
ataaacaatgagaaaaacattcaaggctgccaataacccttcacaggtaatttaacagcctttgactacaaggcatcagt

SEQ ID NO: 139529 - DNA, 80 bp, synthetic construct
  misc_feature 1..80: note = Artificially Synthesized Probe
  source 1..80: mol_type = other DNA
ctgcattctgtcacatgttcgtgtcatgtgggtttccgatatggaacatcagattatttaaaattggtggattaactaaa

SEQ ID NO: 139530 - DNA, 80 bp, synthetic construct; identical to SEQ ID NO: 43689
  misc_feature 1..80: note = Artificially Synthesized Probe
  source 1..80: mol_type = other DNA

SEQ ID NO: 139531 - DNA, 80 bp, synthetic construct
  misc_feature 1..80: note = Artificially Synthesized Probe
  source 1..80: mol_type = other DNA
tcaaagccaacaagaaacatctgtgagttaaaatcaagcaacttgtattcatgtagatcagcgtcagcaatgccttcctc

SEQ ID NO: 139532 - DNA, 80 bp, synthetic construct
  misc_feature 1..80: note = Artificially Synthesized Probe
  source 1..80: mol_type = other DNA
atgtgagtttccttcttgtatgtttcatggcgatgtttagtagcctatctcacacacgttttcacatcaaagatggctca

SEQ ID NO: 139533 - DNA, 80 bp, synthetic construct
  misc_feature 1..80: note = Artificially Synthesized Probe
  source 1..80: mol_type = other DNA
ataaagaataggagaggaagaagattaatcttataagcctgtgactgagtggaaagtatagatgtctcacatcttggcag

SEQ ID NO: 139534 - DNA, 80 bp, synthetic construct; identical to SEQ ID NO: 43690
  misc_feature 1..80: note = Artificially Synthesized Probe
  source 1..80: mol_type = other DNA

SEQ ID NO: 139535 - DNA, 80 bp, synthetic construct
  misc_feature 1..80: note = Artificially Synthesized Probe
  source 1..80: mol_type = other DNA
ggcaccttttgtcttacaaggtgcttttcattttttatcaaatcaggttgtttaacgtggagtcctgaaagagaggcagt

SEQ ID NO: 139536 - DNA, 80 bp, synthetic construct
  misc_feature 1..80: note = Artificially Synthesized Probe
  source 1..80: mol_type = other DNA
gagagcagtgttgattgtggaagatcttggagtccatgttaaatggtctggacctcatcaaataggtcgtaaggagccat

SEQ ID NO: 139537 - DNA, 80 bp, synthetic construct; identical to SEQ ID NO: 43322
  misc_feature 1..80: note = Artificially Synthesized Probe
  source 1..80: mol_type = other DNA

SEQ ID NO: 139538 - DNA, 80 bp, synthetic construct
  misc_feature 1..80: note = Artificially Synthesized Probe
  source 1..80: mol_type = other DNA
tggaaataaaaaatggtgttgattgtgaacatttttagagaccaactacaagaggcagcacactgtgtatggagcatgag

SEQ ID NO: 139539 - DNA, 80 bp, synthetic construct; identical to SEQ ID NO: 43691
  misc_feature 1..80: note = Artificially Synthesized Probe
  source 1..80: mol_type = other DNA

SEQ ID NO: 139540 - DNA, 80 bp, synthetic construct
  misc_feature 1..80: note = Artificially Synthesized Probe
  source 1..80: mol_type = other DNA
cggcaaatgagacctgtggaggctgctgtgtagtttgaagggagagatgtgggaaaggctcatcaaatgctgagagagaa

SEQ ID NO: 139541 - DNA, 80 bp, synthetic construct
  misc_feature 1..80: note = Artificially Synthesized Probe
  source 1..80: mol_type = other DNA
ggtgcaatagcttcgtggcccttatacattgtgagcttggcagagtacaggcattcaagtgcggttatcaacatttaaaa

SEQ ID NO: 139542 - DNA, 80 bp, synthetic construct
  misc_feature 1..80: note = Artificially Synthesized Probe
  source 1..80: mol_type = other DNA
aattctcctacctcagcctcctgagtagctgggattacaggcatgcaccaccacgcctgactaatttttgtatttttagt

SEQ ID NO: 139543 - DNA, 80 bp, synthetic construct
  misc_feature 1..80: note = Artificially Synthesized Probe
  source 1..80: mol_type = other DNA
atcataggagaactctaagatagcagtggaaaaatggaaaaaggacatgattgaaagatttatgaagaactgaaatacat

SEQ ID NO: 139544 - DNA, 80 bp, synthetic construct; identical to SEQ ID NO: 43692
  misc_feature 1..80: note = Artificially Synthesized Probe
  source 1..80: mol_type = other DNA

SEQ ID NO: 139545 - DNA, 80 bp, synthetic construct
  misc_feature 1..80: note = Artificially Synthesized Probe
  source 1..80: mol_type = other DNA
gcgtaaaagctgcttccactgttggaaaaaaaaatgtgtttccctctattctgaaagaaggctgtttttaacactaaaat

SEQ ID NO: 139546 - DNA, 80 bp, synthetic construct
  misc_feature 1..80: note = Artificially Synthesized Probe
  source 1..80: mol_type = other DNA
taaagagtcactggacacagtgttaattgctgaatttctttttgttttttgagacggagtttcgctcttgtggcccaggc

SEQ ID NO: 139547 - DNA, 80 bp, synthetic construct
  misc_feature 1..80: note = Artificially Synthesized Probe
  source 1..80: mol_type = other DNA
ggctggtctcgaattcctgacctctcaggtgatccacccgcctcggcctcctaaagtgctgagattacaggcgtgagcca

SEQ ID NO: 139548 - DNA, 80 bp, synthetic construct
  misc_feature 1..80: note = Artificially Synthesized Probe
  source 1..80: mol_type = other DNA
atccaaaagtgtaacttccgggtaacaagattctacctttgtggatcaaaattagtcaccactttccaaagttaacatgt

SEQ ID NO: 139549 - DNA, 80 bp, synthetic construct; identical to SEQ ID NO: 43693
  misc_feature 1..80: note = Artificially Synthesized Probe
  source 1..80: mol_type = other DNA

SEQ ID NO: 139550 - DNA, 80 bp, synthetic construct
  misc_feature 1..80: note = Artificially Synthesized Probe
  source 1..80: mol_type = other DNA
ctggcaccatcaagattttggtgtcaggtgagagaatgggtaaggacgcctccaggagccagtattccctgaaatgtcta

SEQ ID NO: 139551 - DNA, 80 bp, synthetic construct
  misc_feature 1..80: note = Artificially Synthesized Probe
  source 1..80: mol_type = other DNA
gctgtgcagggtgaggcggggcacgggcagcggttacatgccacaggtgtccgcagtgccctgggcagccggaaagtgcg

SEQ ID NO: 139552 - DNA, 80 bp, synthetic construct
  misc_feature 1..80: note = Artificially Synthesized Probe
  source 1..80: mol_type = other DNA
tggttcagacaagattaagtaactttgtggaaggctaagaacatgatgaggttcatagagtatgttcagtcatgtgacag

SEQ ID NO: 139553 - DNA, 80 bp, synthetic construct; identical to SEQ ID NO: 43694
  misc_feature 1..80: note = Artificially Synthesized Probe
  source 1..80: mol_type = other DNA

SEQ ID NO: 139554 - DNA, 80 bp, synthetic construct
  misc_feature 1..80: note = Artificially Synthesized Probe
  source 1..80: mol_type = other DNA
cactttttctgttggcttaaaatgggaattcagcacacagccaataatttgagtgcttatgatgggcttcttcacaagat

SEQ ID NO: 139555 - DNA, 80 bp, synthetic construct
  misc_feature 1..80: note = Artificially Synthesized Probe
  source 1..80: mol_type = other DNA
caacatcatgtgtctttaaaggtttggaaattgcctgcctttatgatgtgttaaccttttctacacagcgtcctattgaa

SEQ ID NO: 139556 - DNA, 80 bp, synthetic construct
  misc_feature 1..80: note = Artificially Synthesized Probe
  source 1..80: mol_type = other DNA
tatggaatacttaccgagttaatctgtaattagcattttccagtgactgttgatttggataaagttgcattcagttcacc

SEQ ID NO: 139557 - DNA, 80 bp, synthetic construct; identical to SEQ ID NO: 43695
  misc_feature 1..80: note = Artificially Synthesized Probe
  source 1..80: mol_type = other DNA

SEQ ID NO: 139558 - DNA, 80 bp, synthetic construct
  misc_feature 1..80: note = Artificially Synthesized Probe
  source 1..80: mol_type = other DNA
cttcttttcttccaaagaaactcatcaaccctgttcattgttattcctgaaaggcttacttcccaagtgtaaagttgtct

SEQ ID NO: 139559 - DNA, 80 bp, synthetic construct
  misc_feature 1..80: note = Artificially Synthesized Probe
  source 1..80: mol_type = other DNA
tgtggatcaaagggagcaaagtgtggcagaaaacactttcctattgttttaataactaattccatgattgcatcatcttc

SEQ ID NO: 139560 - DNA, 80 bp, synthetic construct
  misc_feature 1..80: note = Artificially Synthesized Probe
  source 1..80: mol_type = other DNA
aattcactgcactgtttctgtaaacctgccatacattctttattttaaatagacagcttttctaaatcattgtgctccgc

SEQ ID NO: 139561 - DNA, 80 bp, synthetic construct; identical to SEQ ID NO: 43696
  misc_feature 1..80: note = Artificially Synthesized Probe
  source 1..80: mol_type = other DNA

SEQ ID NO: 139562 - DNA, 80 bp, synthetic construct
  misc_feature 1..80: note = Artificially Synthesized Probe
  source 1..80: mol_type = other DNA
agtcagtcggtctttgggtagtcatgaagaatatgacttctatacagaggaaatatttgccaggcccaaagctaaacaaa

SEQ ID NO: 139563 - DNA, 80 bp, synthetic construct
  misc_feature 1..80: note = Artificially Synthesized Probe
  source 1..80: mol_type = other DNA
cactggctgtggagcctaagaggagaaaggagtcccacacccgtcatggctcctggtggcattgctgttagcctggcacc

SEQ ID NO: 139564 - DNA, 80 bp, synthetic construct
  misc_feature 1..80: note = Artificially Synthesized Probe
  source 1..80: mol_type = other DNA
cttgataacagccctctgaggagggaaaaccatctctcttcttttatagaaaatcaaattgactttagaaaggctaggga

SEQ ID NO: 139565 - DNA, 80 bp, synthetic construct; identical to SEQ ID NO: 43697
  misc_feature 1..80: note = Artificially Synthesized Probe
  source 1..80: mol_type = other DNA

SEQ ID NO: 139566 - DNA, 80 bp, synthetic construct
  misc_feature 1..80: note = Artificially Synthesized Probe
  source 1..80: mol_type = other DNA
catgtaagttgttatgaccttttataggtcttaaaacatgatttcagttcattcttaactttgtgttacctgctcaacat

SEQ ID NO: 139567 - DNA, 80 bp, synthetic construct
  misc_feature 1..80: note = Artificially Synthesized Probe
  source 1..80: mol_type = other DNA
aagacgatccactctgccaaaaagtttccagggatcaaagatggtgaagagctggccctgcatttgtgattaacaaagta

SEQ ID NO: 139568 - DNA, 80 bp, synthetic construct
  misc_feature 1..80: note = Artificially Synthesized Probe
  source 1..80: mol_type = other DNA
tgctagctctcagcaatataaattaccttttctaataatatatgcagtgatacattagtgaccccaaagaccgaatgcat

SEQ ID NO: 139569 - DNA, 80 bp, synthetic construct
  misc_feature 1..80: note = Artificially Synthesized Probe
  source 1..80: mol_type = other DNA
ctccttaaaataccctttatacattaatatgttcctgtgtaggaagaaaaataaaacatgaaaaggtgaataaatattgc

SEQ ID NO: 139570 - DNA, 80 bp, synthetic construct; identical to SEQ ID NO: 43698
  misc_feature 1..80: note = Artificially Synthesized Probe
  source 1..80: mol_type = other DNA

SEQ ID NO: 139571 - DNA, 80 bp, synthetic construct
  misc_feature 1..80: note = Artificially Synthesized Probe
  source 1..80: mol_type = other DNA
gaaacttagtgcatggttacgaggaagaagacagaagagtgtgaagcattattactagtttagggtgattaaagatagat

SEQ ID NO: 139572 - DNA, 80 bp, synthetic construct
  misc_feature 1..80: note = Artificially Synthesized Probe
  source 1..80: mol_type = other DNA
gtggggcccaactctgcctgttgctttgggccattgaacagccagggtagtacaaaaaactgtcattgcttgacagtgaa

SEQ ID NO: 139573 - DNA, 80 bp, synthetic construct
  misc_feature 1..80: note = Artificially Synthesized Probe
  source 1..80: mol_type = other DNA
tctttgtaaaatgaaaataatttcttgttgactggctcatagaatacttatgaggatggaatatgaaagcagtgtgtgta

SEQ ID NO: 139574 - DNA, 80 bp, synthetic construct; identical to SEQ ID NO: 43699
  misc_feature 1..80: note = Artificially Synthesized Probe
  source 1..80: mol_type = other DNA

SEQ ID NO: 139575 - DNA, 80 bp, synthetic construct
  misc_feature 1..80: note = Artificially Synthesized Probe
  source 1..80: mol_type = other DNA
gaattgtcaccaaaataaaatttaaatactccaaagaagccatttagctaatactgtttctcggaccacatgagtttaca

SEQ ID NO: 139576 - DNA, 80 bp, synthetic construct
  misc_feature 1..80: note = Artificially Synthesized Probe
  source 1..80: mol_type = other DNA
tctccaattttttccctctcagaggaaacatgcaatcatattatgttacaataaatgtagatagctggaagtaaattcag

SEQ ID NO: 139577 - DNA, 80 bp, synthetic construct
  misc_feature 1..80: note = Artificially Synthesized Probe
  source 1..80: mol_type = other DNA
aaaagggggagattttttaaaatgtattatgtttatctttcttatacattctttaacatgttaatgtatgttcatatagg

SEQ ID NO: 139578 - DNA, 80 bp, synthetic construct
  misc_feature 1..80: note = Artificially Synthesized Probe
  source 1..80: mol_type = other DNA
ttagctgatacacatcgcgtgtgttagaaatggcatactccgaagtgcattgagcactggaaagttcatgctgcttagag

SEQ ID NO: 139579 - DNA, 80 bp, synthetic construct; identical to SEQ ID NO: 43700
  misc_feature 1..80: note = Artificially Synthesized Probe
  source 1..80: mol_type = other DNA

SEQ ID NO: 139580 - DNA, 80 bp, synthetic construct; identical to SEQ ID NO: 43323
  misc_feature 1..80: note = Artificially Synthesized Probe
  source 1..80: mol_type = other DNA

SEQ ID NO: 139581 - DNA, 80 bp, synthetic construct
  misc_feature 1..80: note = Artificially Synthesized Probe
  source 1..80: mol_type = other DNA
gtgacaaataaaattcttgaagagaggagaatatgatgtgaactctgaggggttagtgaagctgcctgtcttgtgtgcct

SEQ ID NO: 139582 - DNA, 80 bp, synthetic construct
  misc_feature 1..80: note = Artificially Synthesized Probe
  source 1..80: mol_type = other DNA
gaggagttaaagaagaccaagatagtagagattccacatttatagatgggaggactcagtgttgttaaatgtcaggtatc

SEQ ID NO: 139583 - DNA, 80 bp, synthetic construct; identical to SEQ ID NO: 43701
  misc_feature 1..80: note = Artificially Synthesized Probe
  source 1..80: mol_type = other DNA

SEQ ID NO: 139584 - DNA, 80 bp, synthetic construct
  misc_feature 1..80: note = Artificially Synthesized Probe
  source 1..80: mol_type = other DNA
atatgaaagttaaacttctaaaccttttggaacaaaacataggagaaaatttttctgactttgagatattcagagatttc

SEQ ID NO: 139585 - DNA, 80 bp, synthetic construct
  misc_feature 1..80: note = Artificially Synthesized Probe
  source 1..80: mol_type = other DNA
tatatatctggcctagttcttgattctagagtacttaaagaacaaatcaccactcaaaaataagacaaaaacccaactaa

SEQ ID NO: 139586 - DNA, 80 bp, synthetic construct
  misc_feature 1..80: note = Artificially Synthesized Probe
  source 1..80: mol_type = other DNA
ttaaagccacgaggagatgccactacatacccatcaaaatagctaacaatcaaaagacaacctataccaaatgttagtga

SEQ ID NO: 139587 - DNA, 80 bp, synthetic construct
  misc_feature 1..80: note = Artificially Synthesized Probe
  source 1..80: mol_type = other DNA
aaagatgcatccacctgaaaccttatccatgaatgctcatggcaactttgttcaagtaatcgaaagttagaaacaactca

SEQ ID NO: 139588 - DNA, 80 bp, synthetic construct; identical to SEQ ID NO: 43702
  misc_feature 1..80: note = Artificially Synthesized Probe
  source 1..80: mol_type = other DNA

SEQ ID NO: 139589 - DNA, 80 bp, synthetic construct
  misc_feature 1..80: note = Artificially Synthesized Probe
  source 1..80: mol_type = other DNA
agaaagggcacatgccaagaattatcctacttcctttcgaagattctatgaacttagcattttagatattggaattacat

SEQ ID NO: 139590 - DNA, 80 bp, synthetic construct
  misc_feature 1..80: note = Artificially Synthesized Probe
  source 1..80: mol_type = other DNA
ttatgcaactgtctggtcaagacatgttgcttataattgatgtgtccattacttgaattctcttgtaattatagtcaata

SEQ ID NO: 139591 - DNA, 80 bp, synthetic construct
  misc_feature 1..80: note = Artificially Synthesized Probe
  source 1..80: mol_type = other DNA
cacctgtaatcccagctactcaggaggccaaggcaggagaatcgcttgaacccaggaggtggaggttgcagtgagccaag

SEQ ID NO: 139592 - DNA, 80 bp, synthetic construct
  misc_feature 1..80: note = Artificially Synthesized Probe
  source 1..80: mol_type = other DNA
aattatgaaaatgatattctctgaaaatcaaacatctaatattcagcagcttgtacatgtcctgtgctgcctaaaatttt

SEQ ID NO: 139593 - DNA, 80 bp, synthetic construct; identical to SEQ ID NO: 43703
  misc_feature 1..80: note = Artificially Synthesized Probe
  source 1..80: mol_type = other DNA

SEQ ID NO: 139594 - DNA, 80 bp, synthetic construct
  misc_feature 1..80: note = Artificially Synthesized Probe
  source 1..80: mol_type = other DNA
actttgacactcttctgattctgttctatttctgcatgctattaaacaatttgaaactgtatatgacaacagaaatctct

SEQ ID NO: 139595 - DNA, 80 bp, synthetic construct
  misc_feature 1..80: note = Artificially Synthesized Probe
  source 1..80: mol_type = other DNA
ttttgcagaagtgatttttgggaaactgtgagctttcataaatgccacattaactcttcttacagaagcaaaacaaaacc

SEQ ID NO: 139596 - DNA, 80 bp, synthetic construct; identical to SEQ ID NO: 43704
  misc_feature 1..80: note = Artificially Synthesized Probe
  source 1..80: mol_type = other DNA

SEQ ID NO: 139597 - DNA, 80 bp, synthetic construct
  misc_feature 1..80: note = Artificially Synthesized Probe
  source 1..80: mol_type = other DNA
aggggcattagcatatgaaaccattgtctgatgtgctagttcagcttacttgcacattgaattttcagttaggttttttt

SEQ ID NO: 139598 - DNA, 80 bp, synthetic construct
  misc_feature 1..80: note = Artificially Synthesized Probe
  source 1..80: mol_type = other DNA
agaagggactcctgtagaagcttcacatagctgtttgtgtgcacacacttcgatttgggttatgtttaacagcagtgcct

SEQ ID NO: 139599 - DNA, 80 bp, synthetic construct
  misc_feature 1..80: note = Artificially Synthesized Probe
  source 1..80: mol_type = other DNA
gcaattaggccattttctttctaagatgagtcatctcttttacaatgaagagaaggcaagtcttgtgtggcaatttttct

SEQ ID NO: 139600 - DNA, 80 bp, synthetic construct
  misc_feature 1..80: note = Artificially Synthesized Probe
  source 1..80: mol_type = other DNA
gttgagttctatgttcagatttctctaacatttctgagcccactgattcttcacttgtggccatcactacatcacttaat

SEQ ID NO: 139601 - DNA, 80 bp, synthetic construct
  misc_feature 1..80: note = Artificially Synthesized Probe
  source 1..80: mol_type = other DNA
caatgcaaaataggtttgcactggtcacttgtgccatttgaaaatgtccaccaggttaagtgcagaatgtagtccattag

SEQ ID NO: 139602 - DNA, 80 bp, synthetic construct; identical to SEQ ID NO: 43705
  misc_feature 1..80: note = Artificially Synthesized Probe
  source 1..80: mol_type = other DNA

SEQ ID NO: 139603 - DNA, 80 bp, synthetic construct
  misc_feature 1..80: note = Artificially Synthesized Probe
  source 1..80: mol_type = other DNA
atgagcaaaacgaggagtcttggccttctggagtatttattctagcagaaagagacagacactgaacaaaaggcatagta

SEQ ID NO: 139604 - DNA, 80 bp, synthetic construct
  misc_feature 1..80: note = Artificially Synthesized Probe
  source 1..80: mol_type = other DNA
cataggagcaaggagttgaaggtaattagagaactcgttgtgggtccgcctggcacaagagtgttctgggtggaaagaag

SEQ ID NO: 139605 - DNA, 80 bp, synthetic construct; identical to SEQ ID NO: 43706
  misc_feature 1..80: note = Artificially Synthesized Probe
  source 1..80: mol_type = other DNA

SEQ ID NO: 139606 - DNA, 80 bp, synthetic construct
  misc_feature 1..80: note = Artificially Synthesized Probe
  source 1..80: mol_type = other DNA
tgctaatcatcgccagtttttaggaacgtgaaaattaaaactataataacatgccactgcacacccactaagatgactga

SEQ ID NO: 139607 - DNA, 80 bp, synthetic construct
  misc_feature 1..80: note = Artificially Synthesized Probe
  source 1..80: mol_type = other DNA
tttcctgtaaaactaaacatatacttacttaccatatgacccaacgattccactcctaggaatttacccaaaagggataa

SEQ ID NO: 139608 - DNA, 80 bp, synthetic construct
  misc_feature 1..80: note = Artificially Synthesized Probe
  source 1..80: mol_type = other DNA
aaaaatgaaggcactatggatgcactacattatggatgagtctcaaaagtgtgctaagcaaaagcgcagacacagaagag

SEQ ID NO: 139609 - DNA, 80 bp, synthetic construct
  misc_feature 1..80: note = Artificially Synthesized Probe
  source 1..80: mol_type = other DNA
taatgaaattattctatatcttatttgtggtggtggttacaagggtgagtagatgtgtcaaaactcattgagctatacac

SEQ ID NO: 139610 - DNA, 80 bp, synthetic construct; identical to SEQ ID NO: 43707
  misc_feature 1..80: note = Artificially Synthesized Probe
  source 1..80: mol_type = other DNA

SEQ ID NO: 139611 - DNA, 80 bp, synthetic construct
  misc_feature 1..80: note = Artificially Synthesized Probe
  source 1..80: mol_type = other DNA
actgaagtgtgagagacaaagactggtgcactattccagaataaaggagattcacagacacgccacataatgctgtggtc

SEQ ID NO: 139612 - DNA, 80 bp, synthetic construct
  misc_feature 1..80: note = Artificially Synthesized Probe
  source 1..80: mol_type = other DNA
taagagaaggtccttgttcataggaagctcacaagtattcatgagtaaaagagcatcagttcttcagcttactcccaaat

SEQ ID NO: 139613 - DNA, 80 bp, synthetic construct; identical to SEQ ID NO: 43324
  misc_feature 1..80: note = Artificially Synthesized Probe
  source 1..80: mol_type = other DNA

SEQ ID NO: 139614 - DNA, 80 bp, synthetic construct
  misc_feature 1..80: note = Artificially Synthesized Probe
  source 1..80: mol_type = other DNA
gatccaggttgtgtcaaagggctgtttgctgaaaagcatgcaaatttcctgtgaggaaataactgggaagagccacagaa

SEQ ID NO: 139615 - DNA, 80 bp, synthetic construct; identical to SEQ ID NO: 43708
  misc_feature 1..80: note = Artificially Synthesized Probe
  source 1..80: mol_type = other DNA

SEQ ID NO: 139616 - DNA, 80 bp, synthetic construct
  misc_feature 1..80: note = Artificially Synthesized Probe
  source 1..80: mol_type = other DNA
gagtgactttgaagacagagttgagatttttttctacaattgatgagggtggaagaagtttattattgatttatcaacta

SEQ ID NO: 139617 - DNA, 80 bp, synthetic construct
  misc_feature 1..80: note = Artificially Synthesized Probe
  source 1..80: mol_type = other DNA
gtatgtattttctttctctgacttcctgtgtgaaaaaacagtttgacaccctgaaatgactcacatcctgaatatgttgc

SEQ ID NO: 139618 - DNA, 80 bp, synthetic construct
  misc_feature 1..80: note = Artificially Synthesized Probe
  source 1..80: mol_type = other DNA
agaccacatccatggtaaacagcattctggatgctgtgtggagagtggccagagggtcacaaaaggggcagccaagagac

SEQ ID NO: 139619 - DNA, 80 bp, synthetic construct; identical to SEQ ID NO: 43709
  misc_feature 1..80: note = Artificially Synthesized Probe
  source 1..80: mol_type = other DNA

SEQ ID NO: 139620 - DNA, 80 bp, synthetic construct
  misc_feature 1..80: note = Artificially Synthesized Probe
  source 1..80: mol_type = other DNA
accatttcttgtttaagagataccgagggacttgtgcttggctctgcttttttccttagacaactttgtgttagatcagg

SEQ ID NO: 139621 - DNA, 80 bp, synthetic construct
  misc_feature 1..80: note = Artificially Synthesized Probe
  source 1..80: mol_type = other DNA
ccactgtgatgtgaatacatggtctttggaagcttttaaagtaaattctttcaaaatacatgataaactcagcattaggt

SEQ ID NO: 139622 - DNA, 80 bp, synthetic construct; identical to SEQ ID NO: 43710
  misc_feature 1..80: note = Artificially Synthesized Probe
  source 1..80: mol_type = other DNA

SEQ ID NO: 139623 - DNA, 80 bp, synthetic construct
  misc_feature 1..80: note = Artificially Synthesized Probe
  source 1..80: mol_type = other DNA
tgtccataaaatagtaatgcagagactgttattaatggttaactggaaaagagcttactcttccaatccctgttttcata

SEQ ID NO: 139624 - DNA, 80 bp, synthetic construct
  misc_feature 1..80: note = Artificially Synthesized Probe
  source 1..80: mol_type = other DNA
cgcttatcacttattatggcagtaaaaatgattggttacttacagtcttaggacatattttaactgtgttacttgggcat

SEQ ID NO: 139625 - DNA, 80 bp, synthetic construct
  misc_feature 1..80: note = Artificially Synthesized Probe
  source 1..80: mol_type = other DNA
cttcgaatatgggatgtagaattaggttacaacttctgctgatgaagaaaatgtgaggttccgaatggacattagacatt

SEQ ID NO: 139626 - DNA, 80 bp, synthetic construct
  misc_feature 1..80: note = Artificially Synthesized Probe
  source 1..80: mol_type = other DNA
taaagtaaagactatgaagagacaatcatttttgtagctatcagactttcagtaacatatctcttgtggtttaaataaca

SEQ ID NO: 139627 - DNA, 80 bp, synthetic construct; identical to SEQ ID NO: 43711
  misc_feature 1..80: note = Artificially Synthesized Probe
  source 1..80: mol_type = other DNA

SEQ ID NO: 139628 - DNA, 80 bp, synthetic construct
  misc_feature 1..80: note = Artificially Synthesized Probe
  source 1..80: mol_type = other DNA
cacgaatcccatcaactcaacagttccgtgaatgatcaggttcagtccttgtaagggcttcacaattaggggcctctcgc

SEQ ID NO: 139629 - DNA, 80 bp, synthetic construct
  misc_feature 1..80: note = Artificially Synthesized Probe
  source 1..80: mol_type = other DNA
gactaaatgtgcatgtttgagatttttgtccttgtgccctttttgtgtccatgggcccatgtgtccgtggagtggttctg

SEQ ID NO: 139630 - DNA, 80 bp, synthetic construct
  misc_feature 1..80: note = Artificially Synthesized Probe
  source 1..80: mol_type = other DNA
attcaacctgctcttcttcttcctgcgtagtcacttttttttacttctacctctgcttacccagctgtctaaaaacgaaa

SEQ ID NO: 139631 - DNA, 80 bp, synthetic construct; identical to SEQ ID NO: 43285
  misc_feature 1..80: note = Artificially Synthesized Probe
  source 1..80: mol_type = other DNA

SEQ ID NO: 139632 - DNA, 80 bp, synthetic construct
  misc_feature 1..80: note = Artificially Synthesized Probe
  source 1..80: mol_type = other DNA
cttgtaccctgtgtggagatcactctcacagccatgatcttgtgcagcctttgcagcacctgcggaatgtgcaagtgatg

SEQ ID NO: 139633 - DNA, 80 bp, synthetic construct; identical to SEQ ID NO: 43712
  misc_feature 1..80: note = Artificially Synthesized Probe
  source 1..80: mol_type = other DNA

SEQ ID NO: 139634 - DNA, 80 bp, synthetic construct
  misc_feature 1..80: note = Artificially Synthesized Probe
  source 1..80: mol_type = other DNA
tcctctaatccacttttccatataatgctttctttctttcacatagatcatacttagatcatcacttctatgttgatgta

SEQ ID NO: 139635 - DNA, 80 bp, synthetic construct
  misc_feature 1..80: note = Artificially Synthesized Probe
  source 1..80: mol_type = other DNA
aatcattaaaaagtcaggaaacaacaggtgctggagaggatgcggagaaataggaacacttttacactgttggtgggact

SEQ ID NO: 139636 - DNA, 80 bp, synthetic construct
  misc_feature 1..80: note = Artificially Synthesized Probe
  source 1..80: mol_type = other DNA
accagaaagggcagtcttccctttcacattacattagcaggactaaaaaacttcgttttcatttctcccgcattggtctg

SEQ ID NO: 139637 - DNA, 80 bp, synthetic construct
  misc_feature 1..80: note = Artificially Synthesized Probe
  source 1..80: mol_type = other DNA
actattcacaatagcaaagacttggaaccaacccaaatgtccaacaatgatagactggattaagaaaatgtggcacatat

SEQ ID NO: 139638 - DNA, 80 bp, synthetic construct
  misc_feature 1..80: note = Artificially Synthesized Probe
  source 1..80: mol_type = other DNA
ggagcgattccgtcgccaaacaggtaagttattctctggccggggcggggggtttggaggcggggaccgtccagcgtcag

SEQ ID NO: 139639 - DNA, 80 bp, synthetic construct; identical to SEQ ID NO: 43713
  misc_feature 1..80: note = Artificially Synthesized Probe
  source 1..80: mol_type = other DNA

SEQ ID NO: 139640 - DNA, 80 bp, synthetic construct
  misc_feature 1..80: note = Artificially Synthesized Probe
  source 1..80: mol_type = other DNA
ttttgtttgaaagttgtaggtttatttatacaaactgtgattcgtgtctgctttcccctggcttaaccctttggacatct

SEQ ID NO: 139641 - DNA, 80 bp, synthetic construct
  misc_feature 1..80: note = Artificially Synthesized Probe
  source 1..80: mol_type = other DNA
ttgaatcattgtattgaagaataacagtgaactcaaatctcataaagattgctgatagtgtaaaagagaatgattcttat

SEQ ID NO: 139642 - DNA, 80 bp, synthetic construct
  misc_feature 1..80: note = Artificially Synthesized Probe
  source 1..80: mol_type = other DNA
tgatgttttgacacaatgtgttacatgaaaaaaagtaacctaggtctgagggcatgaatctgaacagccagtggctaaca

SEQ ID NO: 139643 - DNA, 80 bp, synthetic construct; identical to SEQ ID NO: 43714
  misc_feature 1..80: note = Artificially Synthesized Probe
  source 1..80: mol_type = other DNA

SEQ ID NO: 139644 - DNA, 80 bp, synthetic construct
  misc_feature 1..80: note = Artificially Synthesized Probe
  source 1..80: mol_type = other DNA
acagattaatttttaaataacatgctacagtcctagcacagaggattcttttgagacgtaaaacaacggttgtgaaagtg

SEQ ID NO: 139645 - DNA, 80 bp, synthetic construct
  misc_feature 1..80: note = Artificially Synthesized Probe
  source 1..80: mol_type = other DNA
gaccagtgtgatcctctgaaataaatctgtcaaagttgacaatagaaaatgttttccttgatatggcatctcttcagatg

SEQ ID NO: 139646 - DNA, 80 bp, synthetic construct
  misc_feature 1..80: note = Artificially Synthesized Probe
  source 1..80: mol_type = other DNA
atatttacctgcctatgtgctcaaccttatactaagagcattgtggaatataaactaggatgaagtaattgtgcttcacc

SEQ ID NO: 139647 - DNA, 80 bp, synthetic construct
  misc_feature 1..80: note = Artificially Synthesized Probe
  source 1..80: mol_type = other DNA
tattactcatttccagaattctctttttgagggcccctaccagaaattggtcatttctgttcagactcatcagtgcctat

SEQ ID NO: 139648 - DNA, 80 bp, synthetic construct
  misc_feature 1..80: note = Artificially Synthesized Probe
  source 1..80: mol_type = other DNA
tggtagtgtttgtagctcaatacgtgacaaaggacagacagctcagtaggagagttaatctgtagactttaagcacagtg

SEQ ID NO: 139649 - DNA, 80 bp, synthetic construct; identical to SEQ ID NO: 43715
  misc_feature 1..80: note = Artificially Synthesized Probe
  source 1..80: mol_type = other DNA

SEQ ID NO: 139650 - DNA, 80 bp, synthetic construct
  misc_feature 1..80: note = Artificially Synthesized Probe
  source 1..80: mol_type = other DNA
agggggagaagacctttctctgtaatttttatcatcacaaaccattattagacaacagttaacagtcctctctgggcaaa

SEQ ID NO: 139651 - DNA, 80 bp, synthetic construct
  misc_feature 1..80: note = Artificially Synthesized Probe
  source 1..80: mol_type = other DNA
ttgtctgaaatgccaaatatctccaaccctgtatttctgtcaattcgcatgtgaaaatcaggagagacattagcagtagc

SEQ ID NO: 139652 - DNA, 80 bp, synthetic construct
  misc_feature 1..80: note = Artificially Synthesized Probe
  source 1..80: mol_type = other DNA
tttgggttgtcccaccttgggcaagggcagttttgggagaggaggctactggcctttagcgggtggagaccaagtgctgc

SEQ ID NO: 139653 - DNA, 80 bp, synthetic construct; identical to SEQ ID NO: 43716
  misc_feature 1..80: note = Artificially Synthesized Probe
  source 1..80: mol_type = other DNA

SEQ ID NO: 139654 - DNA, 80 bp, synthetic construct
  misc_feature 1..80: note = Artificially Synthesized Probe
  source 1..80: mol_type = other DNA
tagtccctagggcagctgtaattgttggtaggaggagatgagaaggaaagagtagactggaacatttacgttccagttct

SEQ ID NO: 139655 - DNA, 80 bp, synthetic construct
  misc_feature 1..80: note = Artificially Synthesized Probe
  source 1..80: mol_type = other DNA
gatcgagaccatcctggctaacacggtgaaaccccgtctctactaaaaaaatacaaaaaaattaaccgggcgtggtgacg

SEQ ID NO: 139656 - DNA, 80 bp, synthetic construct; identical to SEQ ID NO: 43717
  misc_feature 1..80: note = Artificially Synthesized Probe
  source 1..80: mol_type = other DNA

SEQ ID NO: 139657 - DNA, 80 bp, synthetic construct
  misc_feature 1..80: note = Artificially Synthesized Probe
  source 1..80: mol_type = other DNA
tccatatcacacttcatgcttggttcttaggacacagacctctaaattctgttttgtttatatctgaaaacagtaggcat

SEQ ID NO: 139658 - DNA, 80 bp, synthetic construct; identical to SEQ ID NO: 43325
  misc_feature 1..80: note = Artificially Synthesized Probe
  source 1..80: mol_type = other DNA

SEQ ID NO: 139659 - DNA, 80 bp, synthetic construct
  misc_feature 1..80: note = Artificially Synthesized Probe
  source 1..80: mol_type = other DNA
tcatgttgaaggagtggcttcctggcaaatgtgtttggttttatttctgagttacaatgtcccttcctattcacatgcac

SEQ ID NO: 139660 - DNA, 80 bp, synthetic construct
  misc_feature 1..80: note = Artificially Synthesized Probe
  source 1..80: mol_type = other DNA
atcccttggacaagttcttgtagccttgcatagagttctgcatagggtttaggatttgtttcaaaaaaaattggggaaga

SEQ ID NO: 139661 - DNA, 80 bp, synthetic construct
  misc_feature 1..80: note = Artificially Synthesized Probe
  source 1..80: mol_type = other DNA
agtttaatttaagcattccaggaaaacaaacttttacgtgtcaagatcaacgaatgtaagcatgttcaggaggtcacata

SEQ ID NO: 139662 - DNA, 80 bp, synthetic construct
  misc_feature 1..80: note = Artificially Synthesized Probe
  source 1..80: mol_type = other DNA
taacacatgatatggagacactcaacaaaaattgtcaggtcattggctcttaagggaaagggaccagagttagaaccttc

SEQ ID NO: 139663 - DNA, 80 bp, synthetic construct; identical to SEQ ID NO: 43718
  misc_feature 1..80: note = Artificially Synthesized Probe
  source 1..80: mol_type = other DNA

SEQ ID NO: 139664 - DNA, 80 bp, synthetic construct
  misc_feature 1..80: note = Artificially Synthesized Probe
  source 1..80: mol_type = other DNA
gatgcattcttggggctaatttaggataggagactgggttccattgcccacagagctgaaaaataataatacattttccc

SEQ ID NO: 139665 - DNA, 80 bp, synthetic construct
  misc_feature 1..80: note = Artificially Synthesized Probe
  source 1..80: mol_type = other DNA
agagcggcattgggtgcgcagagccagggtcactcagcctatcaagcgagtctcttgctcgagagccacctggtcctgtc

SEQ ID NO: 139666 - DNA, 80 bp, synthetic construct
  misc_feature 1..80: note = Artificially Synthesized Probe
  source 1..80: mol_type = other DNA
ccatcatttttcaaccctgtgtttctgttttactttatgttgcaaagtctttcaaagtagtcccaagtgctttccttagc

SEQ ID NO: 139667 - DNA, 80 bp, synthetic construct; identical to SEQ ID NO: 43719
  misc_feature 1..80: note = Artificially Synthesized Probe
  source 1..80: mol_type = other DNA

SEQ ID NO: 139668 - DNA, 80 bp, synthetic construct
  misc_feature 1..80: note = Artificially Synthesized Probe
  source 1..80: mol_type = other DNA
tagatgcacagcttaccagagaggatttacgggcagtacagaaataattattcagtatgaaatgcatagttcctctacct

SEQ ID NO: 139669 - DNA, 80 bp, synthetic construct
  misc_feature 1..80: note = Artificially Synthesized Probe
  source 1..80: mol_type = other DNA
aatctgattcagcccagaccctgtcccaaacttagctggcgtattttcattgaatgcagagttttagggttatttcttga

SEQ ID NO: 139670 - DNA, 80 bp, synthetic construct
  misc_feature 1..80: note = Artificially Synthesized Probe
  source 1..80: mol_type = other DNA
taccacaaagatagagagcctctttagtttttccctttgaaaaaaccttatggaccaaatgaaaaccaaaaaacctactg

SEQ ID NO: 139671 - DNA, 80 bp, synthetic construct
  misc_feature 1..80: note = Artificially Synthesized Probe
  source 1..80: mol_type = other DNA
agcagaatttgtacttaaattcttgtctcctcactctgaaaccttaaaacatgtcatccccgccaccccccccacccacc

SEQ ID NO: 139672 - DNA, 80 bp, synthetic construct; identical to SEQ ID NO: 43720
  misc_feature 1..80: note = Artificially Synthesized Probe
  source 1..80: mol_type = other DNA

SEQ ID NO: 139673 - DNA, 80 bp, synthetic construct
  misc_feature 1..80: note = Artificially Synthesized Probe
  source 1..80: mol_type = other DNA
cctcagaactgatggagctgcgacgtgcagtcctaatattcttcctctgcactgccgctcctatttcttgagaatggatt

SEQ ID NO: 139674 - DNA, 80 bp, synthetic construct
  misc_feature 1..80: note = Artificially Synthesized Probe
  source 1..80: mol_type = other DNA
gttgaatgcttaatcagttaatttcttttcttatataggcattaacactagaggtcctaaatttccctccaagtaatgtc

SEQ ID NO: 139675 - DNA, 80 bp, synthetic construct; identical to SEQ ID NO: 43721
  misc_feature 1..80: note = Artificially Synthesized Probe
  source 1..80: mol_type = other DNA

SEQ ID NO: 139676 - DNA, 80 bp, synthetic construct
  misc_feature 1..80: note = Artificially Synthesized Probe
  source 1..80: mol_type = other DNA
ttttctttgcttcttaatagtttaaatctattgttagatacaactatgtatagaattcttatatgttgctggtaaattga

SEQ ID NO: 139677 - DNA, 80 bp, synthetic construct
  misc_feature 1..80: note = Artificially Synthesized Probe
  source 1..80: mol_type = other DNA
tttgaaagtttcatagagctggatttattgtttcataatcctgtctggaaaacttggtgttttggctggagcatttggga

SEQ ID NO: 139678 - DNA, 80 bp, synthetic construct
  misc_feature 1..80: note = Artificially Synthesized Probe
  source 1..80: mol_type = other DNA
ttctttttctgttcttttggtggttagcttagacattttaacacacatgtgacaagtgtaaatgttgctaacacctgtta

SEQ ID NO: 139679 - DNA, 80 bp, synthetic construct
  misc_feature 1..80: note = Artificially Synthesized Probe
  source 1..80: mol_type = other DNA
tgcctgcattcatttcggaaagtacatagcaaacttaaaaacagaaatgttattagttaggaaacaaggaaaaaagggcc

SEQ ID NO: 139680 - DNA, 80 bp, synthetic construct
  misc_feature 1..80: note = Artificially Synthesized Probe
  source 1..80: mol_type = other DNA
catttttctctctgtcaagtgaggtctgaatgcaaaacgttgtacagttttcttatatgcaaagtatttcatttctatgg

SEQ ID NO: 139681 - DNA, 80 bp, synthetic construct; identical to SEQ ID NO: 43722
  misc_feature 1..80: note = Artificially Synthesized Probe
  source 1..80: mol_type = other DNA

SEQ ID NO: 139682 - DNA, 80 bp, synthetic construct
  misc_feature 1..80: note = Artificially Synthesized Probe
  source 1..80: mol_type = other DNA
caaagaccctgtgtttgggagtgactagagatgaggctggacagttgaattgggagtgaattgggaagttcactgaatgc

SEQ ID NO: 139683 - DNA, 80 bp, synthetic construct
  misc_feature 1..80: note = Artificially Synthesized Probe
  source 1..80: mol_type = other DNA
cattccagtctaatggagatgggctcatgatgaatcattatacagatgattccaaatcacagctgtgaagctgcaaagaa

SEQ ID NO: 139684 - DNA, 80 bp, synthetic construct
  misc_feature 1..80: note = Artificially Synthesized Probe
  source 1..80: mol_type = other DNA
ggcgtttttcataaatgttttcattttaacagcgttgcaaatatggttgcaaaaaagctctaatgattactagtgagatt

SEQ ID NO: 139685 - DNA, 80 bp, synthetic construct; identical to SEQ ID NO: 43723
  misc_feature 1..80: note = Artificially Synthesized Probe
  source 1..80: mol_type = other DNA

SEQ ID NO: 139686 - DNA, 80 bp, synthetic construct
  misc_feature 1..80: note = Artificially Synthesized Probe
  source 1..80: mol_type = other DNA
cttccatcccagggacccattatcctccttacagcatttctattctgttttaatattgagtagaataggctccctttctc

SEQ ID NO: 139687 - DNA, 80 bp, synthetic construct
  misc_feature 1..80: note = Artificially Synthesized Probe
  source 1..80: mol_type = other DNA
gaatttttaaattatatattgccttcttattggtatataggaaagctattgacttttgtctatttttcttgtatcaagcc

SEQ ID NO: 139688 - DNA, 80 bp, synthetic construct; identical to SEQ ID NO: 43724
  misc_feature 1..80: note = Artificially Synthesized Probe
  source 1..80: mol_type = other DNA

SEQ ID NO: 139689 - DNA, 80 bp, synthetic construct
  misc_feature 1..80: note = Artificially Synthesized Probe
  source 1..80: mol_type = other DNA
aagtaaacccggacatagatagcttcagtaacttattcaagataaaagttacagagcctggatttgaacctattcaggtt

SEQ ID NO: 139690 - DNA, 80 bp, synthetic construct
  misc_feature 1..80: note = Artificially Synthesized Probe
  source 1..80: mol_type = other DNA
tatgtattgtcagcatgctgtgctgtgatcactgagacctgcagaaactagagttttccacaaaggagccatggacagta

SEQ ID NO: 139691 - DNA, 80 bp, synthetic construct
  misc_feature 1..80: note = Artificially Synthesized Probe
  source 1..80: mol_type = other DNA
tgctgtcctagacttaaggaaacagagtaagtaaaatatcttggattggaaagggtgtgaaagtgtagaaatgctaaaag

SEQ ID NO: 139692 - DNA, 80 bp, synthetic construct
  misc_feature 1..80: note = Artificially Synthesized Probe
  source 1..80: mol_type = other DNA
attcccaaccacatatttccccctgtctacatgagatttcatctcatgagatttgccgagagaaaggccaagatgtatat

SEQ ID NO: 139693 - DNA, 80 bp, synthetic construct; identical to SEQ ID NO: 43725
  misc_feature 1..80: note = Artificially Synthesized Probe
  source 1..80: mol_type = other DNA

SEQ ID NO: 139694 - DNA, 80 bp, synthetic construct
  misc_feature 1..80: note = Artificially Synthesized Probe
  source 1..80: mol_type = other DNA
ttggaatcagcagcagttgcatgagcacagctgtatttaaaagcagtgaggatgccccagacacttttactatatagcca

SEQ ID NO: 139695 - DNA, 80 bp, synthetic construct
  misc_feature 1..80: note = Artificially Synthesized Probe
  source 1..80: mol_type = other DNA
aaaaagcatatatttgaagagcaaacaacacttaagtccatgaaatgctgccctgtcatactatcaaataatggctcctt

SEQ ID NO: 139696 - DNA, 80 bp, synthetic construct
  misc_feature 1..80: note = Artificially Synthesized Probe
  source 1..80: mol_type = other DNA
aacacagcacttggaaaacctgtgtggaattagtgggttgaaaagctgagtcttatttataaaatctctttgttactctt

SEQ ID NO: 139697 - DNA, 80 bp, synthetic construct; identical to SEQ ID NO: 43726
  misc_feature 1..80: note = Artificially Synthesized Probe
  source 1..80: mol_type = other DNA

SEQ ID NO: 139698 - DNA, 80 bp, synthetic construct
  misc_feature 1..80: note = Artificially Synthesized Probe
  source 1..80: mol_type = other DNA
agttgattcagccattctcttacaaatgaacatttggggttttactcattaccactacaaacaatgctatattaaatatt

SEQ ID NO: 139699 - DNA, 80 bp, synthetic construct
  misc_feature 1..80: note = Artificially Synthesized Probe
  source 1..80: mol_type = other DNA
tggtctcagtattcttatcatgtcaaaataagctctacttaagtagtaccattttaataaattgaatgtatcttaaactc

SEQ ID NO: 139700 - DNA, 80 bp, synthetic construct
  misc_feature 1..80: note = Artificially Synthesized Probe
  source 1..80: mol_type = other DNA
tttttttaatagcctagtaaaatttacatagtcattgagaataggagaatttaaattcctgttttgtgtttaaatattta

SEQ ID NO: 139701 - DNA, 80 bp, synthetic construct; identical to SEQ ID NO: 43727
  misc_feature 1..80: note = Artificially Synthesized Probe
  source 1..80: mol_type = other DNA

SEQ ID NO: 139702 - DNA, 80 bp, synthetic construct
  misc_feature 1..80: note = Artificially Synthesized Probe
  source 1..80: mol_type = other DNA
aggttgatcttctttgtttcgagtcctgatattattgttacttaataatgtcctaattaccctattatctttggagcatt

SEQ ID NO: 139703 - DNA, 80 bp, synthetic construct
  misc_feature 1..80: note = Artificially Synthesized Probe
  source 1..80: mol_type = other DNA
cacatagtgtacgtacacatagtgtatagcaggctctgggggtatctacagtgtacaatgctgaaatgatttgtaatcat

SEQ ID NO: 139704 - DNA, 80 bp, synthetic construct
  misc_feature 1..80: note = Artificially Synthesized Probe
  source 1..80: mol_type = other DNA
atcacgcaccttggtagaatttgcctattccaaaacctctgctgtggaactttctttttttccccaactttgttgtaaat

SEQ ID NO: 139705 - DNA, 80 bp, synthetic construct
  misc_feature 1..80: note = Artificially Synthesized Probe
  source 1..80: mol_type = other DNA
agaggtttgtttttttgttttgttttgttttttcaaattaactcagtattactaatgatagaaagggtccttttttaaaa

SEQ ID NO: 139706 - DNA, 80 bp, synthetic construct; identical to SEQ ID NO: 43728
  misc_feature 1..80: note = Artificially Synthesized Probe
  source 1..80: mol_type = other DNA

SEQ ID NO: 139707 - DNA, 80 bp, synthetic construct
  misc_feature 1..80: note = Artificially Synthesized Probe
  source 1..80: mol_type = other DNA
cttttcctttgcacttttaatgacaaaatcaaatggcagcaaagaaaagaatctctacttacttggggcacacctctttc

SEQ ID NO: 139708 - DNA, 80 bp, synthetic construct
  misc_feature 1..80: note = Artificially Synthesized Probe
  source 1..80: mol_type = other DNA
gaaatgtgtgttgattggagaggattgctattgtggtttaagggagcataatttattccatcagagtacaaaggcagcaa

SEQ ID NO: 139709 - DNA, 80 bp, synthetic construct
  misc_feature 1..80: note = Artificially Synthesized Probe
  source 1..80: mol_type = other DNA
cttgatatttgccttctagaattacaaataaatgacagccagaacatctttaggttcagtacctcagtgtatgcagtact

SEQ ID NO: 139710 - DNA, 80 bp, synthetic construct; identical to SEQ ID NO: 43729
  misc_feature 1..80: note = Artificially Synthesized Probe
  source 1..80: mol_type = other DNA

SEQ ID NO: 139711 - DNA, 80 bp, synthetic construct
  misc_feature 1..80: note = Artificially Synthesized Probe
  source 1..80: mol_type = other DNA
gtaatgtttcttcccttctaagatggtcctttgtccttttctcagtttctggctgacaccgagtgcccccatgttaattt

SEQ ID NO: 139712 - DNA, 80 bp, synthetic construct
  misc_feature 1..80: note = Artificially Synthesized Probe
  source 1..80: mol_type = other DNA
aagtggtttttctaatcttgtcaccctcgtaagtggtcagattcttaactttttttcttcaccatcttaaaaccatcgac

SEQ ID NO: 139713 - DNA, 80 bp, synthetic construct; identical to SEQ ID NO: 43326
  misc_feature 1..80: note = Artificially Synthesized Probe
  source 1..80: mol_type = other DNA

SEQ ID NO: 139714 - DNA, 80 bp, synthetic construct
  misc_feature 1..80: note = Artificially Synthesized Probe
  source 1..80: mol_type = other DNA
tttaaaacacttaagaattgaataggactgtgcagatgaatagaaagtcagcttgtagatgccatgttccaacaataata

SEQ ID NO: 139715 - DNA, 80 bp, synthetic construct; identical to SEQ ID NO: 43730
  misc_feature 1..80: note = Artificially Synthesized Probe
  source 1..80: mol_type = other DNA

SEQ ID NO: 139716 - DNA, 80 bp, synthetic construct
  misc_feature 1..80: note = Artificially Synthesized Probe
  source 1..80: mol_type = other DNA
tggacccaacagttattagtaatttgattaagtctgtaccatgtgtaaaattactctcagcagtcagggtatcgatgctt

SEQ ID NO: 139717 - DNA, 80 bp, synthetic construct
  misc_feature 1..80: note = Artificially Synthesized Probe
  source 1..80: mol_type = other DNA
ccaagatctccactctatgtatgaataagtgagatgtactccggtacagcggaagaaaacaaagcaactccaagttgtct

SEQ ID NO: 139718 - DNA, 80 bp, synthetic construct
  misc_feature 1..80: note = Artificially Synthesized Probe
  source 1..80: mol_type = other DNA
tatttcacagaacttcagacttcctagctagattgacagctgagttatttgcccatctctagtgactgacaacaggtaat

SEQ ID NO: 139719 - DNA, 80 bp, synthetic construct
  misc_feature 1..80: note = Artificially Synthesized Probe
  source 1..80: mol_type = other DNA
aggctttacagattctggacttcttctgacattgcagttatcaggtaatcagagagagatataaatgcaagcaattgtta

SEQ ID NO: 139720 - DNA, 80 bp, synthetic construct; identical to SEQ ID NO: 43731
  misc_feature 1..80: note = Artificially Synthesized Probe
  source 1..80: mol_type = other DNA

SEQ ID NO: 139721 - DNA, 80 bp, synthetic construct
  misc_feature 1..80: note = Artificially Synthesized Probe
  source 1..80: mol_type = other DNA
taaaattagttaaatatatggcaacaattacttgttattttatagctatttaaaacactatgtagtttcaacttatttca

SEQ ID NO: 139722 - DNA, 80 bp, synthetic construct
  misc_feature 1..80: note = Artificially Synthesized Probe
  source 1..80: mol_type = other DNA
acacagcaagtgaagtttaatgccgtggtaaaagttcttatgttccaacctgtccacctaagatacggaatttaagataa

SEQ ID NO: 139723 - DNA, 80 bp, synthetic construct; identical to SEQ ID NO: 43732
  misc_feature 1..80: note = Artificially Synthesized Probe
  source 1..80: mol_type = other DNA

SEQ ID NO: 139724 - DNA, 80 bp, synthetic construct
  misc_feature 1..80: note = Artificially Synthesized Probe
  source 1..80: mol_type = other DNA
aacaggactcgagtgtaagctgaaatatgtaaaactgagtggcagtgggaatcaattcagccatttttttctttccataa

SEQ ID NO: 139725 - DNA, 80 bp, synthetic construct
  misc_feature 1..80: note = Artificially Synthesized Probe
  source 1..80: mol_type = other DNA
cagcttttgggaattaaattgaaatttaagactctaaaattttttactgagtgcttcaatttcaacaaagtattcttgga

SEQ ID NO: 139726 - DNA, 80 bp, synthetic construct
  misc_feature 1..80: note = Artificially Synthesized Probe
  source 1..80: mol_type = other DNA
gctttcagataacagtactcacataattaagtggctataatcactttacccacatgtgctatacctgctagaaggatact

SEQ ID NO: 139727 - DNA, 80 bp, synthetic construct
  misc_feature 1..80: note = Artificially Synthesized Probe
  source 1..80: mol_type = other DNA
gggatccactgatgttttggcagggaggtttatagggatgaagttttctgtatttgtatggagtagccaagatatcagtg

SEQ ID NO: 139728 - DNA, 80 bp, synthetic construct; identical to SEQ ID NO: 43733
  misc_feature 1..80: note = Artificially Synthesized Probe
  source 1..80: mol_type = other DNA

SEQ ID NO: 139729 - DNA, 80 bp, synthetic construct
  misc_feature 1..80: note = Artificially Synthesized Probe
  source 1..80: mol_type = other DNA
gacctgagtttttttaactaatttctagcaaaaggtccactaagcaaactgtaattgaattcaaaaagaaaatattcttg

SEQ ID NO: 139730 - DNA, 80 bp, synthetic construct
  misc_feature 1..80: note = Artificially Synthesized Probe
  source 1..80: mol_type = other DNA
ttatgatcgagtatctgtggaaaatgcatggaacttatacttgtctttaaaggaaaatttctaagcttaggaaaccatga

SEQ ID NO: 139731 - DNA, 80 bp, synthetic construct
  misc_feature 1..80: note = Artificially Synthesized Probe
  source 1..80: mol_type = other DNA
tgtcatattagaactgattgggatttgtctgaagttgaactccaaactaaattcacagtcttaaataattttataaatga

SEQ ID NO: 139732 - DNA, 80 bp, synthetic construct
  misc_feature 1..80: note = Artificially Synthesized Probe
  source 1..80: mol_type = other DNA
agcaaaccttacaaatcaagaaaaaatctgaaataaaaattttaatataacagctaaaaatgtagtgctttaaagaagtt

SEQ ID NO: 139733 - DNA, 80 bp, synthetic construct; identical to SEQ ID NO: 43734
  misc_feature 1..80: note = Artificially Synthesized Probe
  source 1..80: mol_type = other DNA

SEQ ID NO: 139734 - DNA, 80 bp, synthetic construct
  misc_feature 1..80: note = Artificially Synthesized Probe
  source 1..80: mol_type = other DNA
ctatacagtattagaaatccctcaattaatcatcaggttaaattagaagatcaaataattatctcaaaggatgccaaaag

SEQ ID NO: 139735 - DNA, 80 bp, synthetic construct
  misc_feature 1..80: note = Artificially Synthesized Probe
  source 1..80: mol_type = other DNA
aaggtaagattttgtgaccataaggaacccagccagggacgagaaagtgactttctttactcagtggcaatgcaaattca

SEQ ID NO: 139736 - DNA, 80 bp, synthetic construct
  misc_feature 1..80: note = Artificially Synthesized Probe
  source 1..80: mol_type = other DNA
gaatatgatatgaaaaatcaggaaacgtactgattttaaactggtttttacaattttgatttatttgaagatgtattggt

SEQ ID NO: 139737 - DNA, 80 bp, synthetic construct
  misc_feature 1..80: note = Artificially Synthesized Probe
  source 1..80: mol_type = other DNA
tgcaagccattcctagtagtgtgatgatagctctcttagtcccactctttcccactcagggtgcgaatcatccctttgtc

SEQ ID NO: 139738 - DNA, 80 bp, synthetic construct
  misc_feature 1..80: note = Artificially Synthesized Probe
  source 1..80: mol_type = other DNA
tggggaggcctcaggaaacttacaatcatggtgaaaaggcaaaggggaaactaacaccttcccatggtggcaggagagag

SEQ ID NO: 139739 - DNA, 80 bp, synthetic construct; identical to SEQ ID NO: 43735
  misc_feature 1..80: note = Artificially Synthesized Probe
  source 1..80: mol_type = other DNA

SEQ ID NO: 139740 - DNA, 80 bp, synthetic construct
  misc_feature 1..80: note = Artificially Synthesized Probe
  source 1..80: mol_type = other DNA
tattttattagttattgctaacctcctcatgtgcgtaatttataaattaaactttatcataggtatgtgtatgtaggaaa

SEQ ID NO: 139741 - DNA, 80 bp, synthetic construct
  misc_feature 1..80: note = Artificially Synthesized Probe
  source 1..80: mol_type = other DNA
acggaaggtgttccctgcacataagggcactacaatgtgaaactttttcctggaaatcaagaacaagattgtatgtgatg

SEQ ID NO: 139742 - DNA, 80 bp, synthetic construct
  misc_feature 1..80: note = Artificially Synthesized Probe
  source 1..80: mol_type = other DNA
attagagctataatcaattagaaaaatactaatgggaaaatcccattcacaattgtaacaaagataaataataactttgt

SEQ ID NO: 139743 - DNA, 80 bp, synthetic construct; identical to SEQ ID NO: 43736
  misc_feature 1..80: note = Artificially Synthesized Probe
  source 1..80: mol_type = other DNA

SEQ ID NO: 139744 - DNA, 80 bp, synthetic construct
  misc_feature 1..80: note = Artificially Synthesized Probe
  source 1..80: mol_type = other DNA
tcaaagctaaatacatctgatttcaaagctctaaaaaggtacaaaaaagcaacacatcacatagattgacctcaggcaga

SEQ ID NO: 139745 - DNA, 80 bp, synthetic construct
  misc_feature 1..80: note = Artificially Synthesized Probe
  source 1..80: mol_type = other DNA
aattccttgggctcaagtgatcctccctcctcagcctcctgagtagctggtaccacaggcactcaccacagcacctggct

SEQ ID NO: 139746 - DNA, 80 bp, synthetic construct
  misc_feature 1..80: note = Artificially Synthesized Probe
  source 1..80: mol_type = other DNA
acaagtcaatgtaaaagggaaatattatttaatatttaataaattttgtgagacttactaggatagcagtttgacagagt

SEQ ID NO: 139747 - DNA, 80 bp, synthetic construct; identical to SEQ ID NO: 43737
  misc_feature 1..80: note = Artificially Synthesized Probe
  source 1..80: mol_type = other DNA

SEQ ID NO: 139748 - DNA, 80 bp, synthetic construct
  misc_feature 1..80: note = Artificially Synthesized Probe
  source 1..80: mol_type = other DNA
atagtttaatcttaattctttatgaaatgacaacaaattttgtatgctttttgtgttgaaatatttgttcttgaaattaa

SEQ ID NO: 139749 - DNA, 80 bp, synthetic construct
  misc_feature 1..80: note = Artificially Synthesized Probe
  source 1..80: mol_type = other DNA
ttgtactaactccctgcttacttgattatcttgcaattccaactacctggaataaaacccagaaatagccttgcaagaag

SEQ ID NO: 139750 - DNA, 80 bp, synthetic construct
  misc_feature 1..80: note = Artificially Synthesized Probe
  source 1..80: mol_type = other DNA
tgtctggaaaggtatttattataactagtaacttaacaaatgcaaacttttttaaaagaaaaaaatgatatacccttttg

SEQ ID NO: 139751 - DNA, 80 bp, synthetic construct
  misc_feature 1..80: note = Artificially Synthesized Probe
  source 1..80: mol_type = other DNA
agagaactattttcacagtgctatttactgaaagtagcccaaatatcaaggggttggggccacacagtcactttgactgt

SEQ ID NO: 139752 - DNA, 80 bp, synthetic construct
  misc_feature 1..80: note = Artificially Synthesized Probe
  source 1..80: mol_type = other DNA
aagactatacgagtgaaataatgcatgtaaaaattaccacttagcatgtggtaattttagctatctcataccagtcagaa

SEQ ID NO: 139753 - DNA, 80 bp, synthetic construct; identical to SEQ ID NO: 43738
  misc_feature 1..80: note = Artificially Synthesized Probe
  source 1..80: mol_type = other DNA

SEQ ID NO: 139754 - DNA, 80 bp, synthetic construct
  misc_feature 1..80: note = Artificially Synthesized Probe
  source 1..80: mol_type = other DNA
tggatggagctggaagccattatcctcagcaaactctcgcaggaacagaaaaccaaacaccacatgttctcacttacaag

SEQ ID NO: 139755 - DNA, 80 bp, synthetic construct
  misc_feature 1..80: note = Artificially Synthesized Probe
  source 1..80: mol_type = other DNA
accctggaacttaaaataaaataaaattaccacttagcatatgtcatatattaataaaaagccttgaattaactattcat

SEQ ID NO: 139756 - DNA, 80 bp, synthetic construct
  misc_feature 1..80: note = Artificially Synthesized Probe
  source 1..80: mol_type = other DNA
tgtctaagtaaatcagagactgaatcagccaaattcttgggggctaactaatcaaagctaccctctgatttaactgccga

SEQ ID NO: 139757 - DNA, 80 bp, synthetic construct
  misc_feature 1..80: note = Artificially Synthesized Probe
  source 1..80: mol_type = other DNA
tctgagcacctacatgaatgcaagtattggtggtatagagtaatttagtcattccccacattcaatagaacctactttaa

SEQ ID NO: 139758 - DNA, 80 bp, synthetic construct; identical to SEQ ID NO: 43739
  misc_feature 1..80: note = Artificially Synthesized Probe
  source 1..80: mol_type = other DNA

SEQ ID NO: 139759 - DNA, 80 bp, synthetic construct
  misc_feature 1..80: note = Artificially Synthesized Probe
  source 1..80: mol_type = other DNA
tttcaattatgttttcaagaactcctatttgggtttctgaaaaagagcctaaaactggtgtgctggtttcaggggtgtat

SEQ ID NO: 139760 - DNA, 80 bp, synthetic construct; identical to SEQ ID NO: 43327
  misc_feature 1..80: note = Artificially Synthesized Probe
  source 1..80: mol_type = other DNA

SEQ ID NO: 139761 - DNA, 80 bp, synthetic construct
  misc_feature 1..80: note = Artificially Synthesized Probe
  source 1..80: mol_type = other DNA
aaaaatgtactgaatttctctctctgttaagacagggaaataatgtggtgtgaaattccaagataggctttgcaagtgag

SEQ ID NO: 139762 - DNA, 80 bp, synthetic construct
  misc_feature 1..80: note = Artificially Synthesized Probe
  source 1..80: mol_type = other DNA
tatcttgaataatttcatctcataggcatgcactgtggcagatgtttgcaaatcttggtttaaaactgattgaagtattt

SEQ ID NO: 139763 - DNA, 80 bp, synthetic construct; identical to SEQ ID NO: 43740
  misc_feature 1..80: note = Artificially Synthesized Probe
  source 1..80: mol_type = other DNA

SEQ ID NO: 139764 - DNA, 80 bp, synthetic construct
  misc_feature 1..80: note = Artificially Synthesized Probe
  source 1..80: mol_type = other DNA
gcgcaaaatgcatagagcttgtaaccatatgtttttgcttgacaaaaagctaaaactcaagatcaattttcaatatggaa

SEQ ID NO: 139765 - DNA, 80 bp, synthetic construct
  misc_feature 1..80: note = Artificially Synthesized Probe
  source 1..80: mol_type = other DNA
tggaggcgcaaagccaatgacatttgagcattcatatattttcataaactttgaacaatgtcagtgagacacctcttcaa

SEQ ID NO: 139766 - DNA, 80 bp, synthetic construct
  misc_feature 1..80: note = Artificially Synthesized Probe
  source 1..80: mol_type = other DNA
tcttcaccactagtttcctttcccttcccaccttttccccaccacctctccccaaaaggcattatatgaaagcattttgt

SEQ ID NO: 139767 - DNA, 80 bp, synthetic construct; identical to SEQ ID NO: 43741
  misc_feature 1..80: note = Artificially Synthesized Probe
  source 1..80: mol_type = other DNA

SEQ ID NO: 139768 - DNA, 80 bp, synthetic construct
  misc_feature 1..80: note = Artificially Synthesized Probe
  source 1..80: mol_type = other DNA
tcagtttgttataaataacacggcgttaattgaatcaacatccactacgtagaaggtgtctctcactttagagtgttgtc

SEQ ID NO: 139769 - DNA, 80 bp, synthetic construct
  misc_feature 1..80: note = Artificially Synthesized Probe
  source 1..80: mol_type = other DNA
tacctaaaatctctttaatcttgctaatctccacattgagtgtgtcctaatattagaatgaaaagcattactagtactca

SEQ ID NO: 139770 - DNA, 80 bp, synthetic construct
  misc_feature 1..80: note = Artificially Synthesized Probe
  source 1..80: mol_type = other DNA
tttgcattggtagggtagaatccattagtaataccatatcagaagacatagctgttaattgcatccataatttcaataaa

SEQ ID NO: 139771 - DNA, 80 bp, synthetic construct; identical to SEQ ID NO: 43742
  misc_feature 1..80: note = Artificially Synthesized Probe
  source 1..80: mol_type = other DNA

SEQ ID NO: 139772 - DNA, 80 bp, synthetic construct
  misc_feature 1..80: note = Artificially Synthesized Probe
  source 1..80: mol_type = other DNA
agcagtctcacttttgagtttgaatcttaggattgttagtggaagttaggaagactcactgaaacaaagtcttcagagta

SEQ ID NO: 139773 - DNA, 80 bp, synthetic construct
  misc_feature 1..80: note = Artificially Synthesized Probe
  source 1..80: mol_type = other DNA
tgtgaagtacaggactacatcagtaaacactgtcatcctgccctcacagagcttgcattctacatatgaataggtgtaaa

SEQ ID NO: 139774 - DNA, 80 bp, synthetic construct
  misc_feature 1..80: note = Artificially Synthesized Probe
  source 1..80: mol_type = other DNA
gtctgaggaagacagggaacaagctgttcacggagatgagagcttgaaagcatttcagacaaaagactgagcacggagac

SEQ ID NO: 139775 - DNA, 80 bp, synthetic construct
  misc_feature 1..80: note = Artificially Synthesized Probe
  source 1..80: mol_type = other DNA
ttttctcctttatggaggatggtttgggaggacggaaggtagaattaggagactagttaggagatattggctgcgatcag

SEQ ID NO: 139776 - DNA, 80 bp, synthetic construct; identical to SEQ ID NO: 43743
  misc_feature 1..80: note = Artificially Synthesized Probe
  source 1..80: mol_type = other DNA

SEQ ID NO: 139777 - DNA, 80 bp, synthetic construct
  misc_feature 1..80: note = Artificially Synthesized Probe
  source 1..80: mol_type = other DNA
aaatgagagggagcagtataaaagaagtgaaggaaacagtgggcttccagaagaaagagatggtcagctgtagctactgc

SEQ ID NO: 139778 - DNA, 80 bp, synthetic construct
  misc_feature 1..80: note = Artificially Synthesized Probe
  source 1..80: mol_type = other DNA
tgggccactgcagtcctggaagattccaattttgagtatttactcattcaaaactgtgttttctttataaaacatgaacg

SEQ ID NO: 139779 - DNA, 80 bp, synthetic construct
  misc_feature 1..80: note = Artificially Synthesized Probe
  source 1..80: mol_type = other DNA
aggtgttgggcaggactggcttcttctgagtcctctctccttgggtggtggatgaccgtcttccctgtgtcttcacgtgg

SEQ ID NO: 139780 - DNA, 80 bp, synthetic construct; identical to SEQ ID NO: 43744
  misc_feature 1..80: note = Artificially Synthesized Probe
  source 1..80: mol_type = other DNA

SEQ ID NO: 139781 - DNA, 80 bp, synthetic construct
  misc_feature 1..80: note = Artificially Synthesized Probe
  source 1..80: mol_type = other DNA
tgccttcgagggtgtatgctcccgtgtcatatagacatacgttgttaaagctgtcccatcctatcttttacatttgtgtc

SEQ ID NO: 139782 - DNA, 80 bp, synthetic construct
  misc_feature 1..80: note = Artificially Synthesized Probe
  source 1..80: mol_type = other DNA
tccttctgctgtatgttcaggtgcctttgttgtagtcacgaataaaattagcacagctaacatctcagatatcagaataa

SEQ ID NO: 139783 - DNA, 80 bp, synthetic construct
  misc_feature 1..80: note = Artificially Synthesized Probe
  source 1..80: mol_type = other DNA
taaatttactcaggatcaaaaccattcaagtgcaagatatgccattttgcaacagctcagcttggagatgccagaaacca

SEQ ID NO: 139784 - DNA, 80 bp, synthetic construct; identical to SEQ ID NO: 43745
  misc_feature 1..80: note = Artificially Synthesized Probe
  source 1..80: mol_type = other DNA

SEQ ID NO: 139785 - DNA, 80 bp, synthetic construct
  misc_feature 1..80: note = Artificially Synthesized Probe
  source 1..80: mol_type = other DNA
tctccactaaggaagtgctagtagctggtagctgtttgtcagggcaggatgggtgttcgttctcactgcacagtttccat

SEQ ID NO: 139786 - DNA, 80 bp, synthetic construct
  misc_feature 1..80: note = Artificially Synthesized Probe
  source 1..80: mol_type = other DNA
gtgcttcgtttcttcagctcgtgcaggtgctagttgtagcatgtgacttatcactggtttctgtggtttgctgcattttt

SEQ ID NO: 139787 - DNA, 80 bp, synthetic construct
  misc_feature 1..80: note = Artificially Synthesized Probe
  source 1..80: mol_type = other DNA
tcaaggatgaattcttgcaacagaggctgcttcgcttcagaaacgttatgaagaacgtgtgtgatgaccaatcatgagca

SEQ ID NO: 139788 - DNA, 80 bp, synthetic construct; identical to SEQ ID NO: 43746
  misc_feature 1..80: note = Artificially Synthesized Probe
  source 1..80: mol_type = other DNA

SEQ ID NO: 139789 - DNA, 80 bp, synthetic construct
  misc_feature 1..80: note = Artificially Synthesized Probe
  source 1..80: mol_type = other DNA
tacattattatctaaaggattgagattatatctccataaatcacactgtggattaaattatggctttcacagattctgtc

SEQ ID NO: 139790 - DNA, 80 bp, synthetic construct
  misc_feature 1..80: note = Artificially Synthesized Probe
  source 1..80: mol_type = other DNA
ctgataaagtattgaaaaagaaatgctttagaagtatattcagtgcagcaaacttacctttgactgtgtgctgttggcca

SEQ ID NO: 139791 - DNA, 80 bp, synthetic construct
  misc_feature 1..80: note = Artificially Synthesized Probe
  source 1..80: mol_type = other DNA
gagacccactctcattttaacagagtagggaaggccttccgagaagacagtggggtaggaagagccctgactaacgggcc

SEQ ID NO: 139792 - DNA, 80 bp, synthetic construct; identical to SEQ ID NO: 43747
  misc_feature 1..80: note = Artificially Synthesized Probe
  source 1..80: mol_type = other DNA

SEQ ID NO: 139793 - DNA, 80 bp, synthetic construct
  misc_feature 1..80: note = Artificially Synthesized Probe
  source 1..80: mol_type = other DNA
cttcctgtgctattcagtaatataatggtcatcatatttaaaacagcttcaggtaacaggaaaacagtcattaaagtgat

SEQ ID NO: 139794 - DNA, 80 bp, synthetic construct
  misc_feature 1..80: note = Artificially Synthesized Probe
  source 1..80: mol_type = other DNA
acattgatagtctttagagtgtgaggaaaattgatcaaaatattaattagacttttgttttgctagtttgcgttagacag

SEQ ID NO: 139795 - DNA, 80 bp, synthetic construct
  misc_feature 1..80: note = Artificially Synthesized Probe
  source 1..80: mol_type = other DNA
taccctcctttccattgttatggtaaattccttaaatacagttatgacattcttctcccacttctaatcctgtactgaag

SEQ ID NO: 139796 - DNA, 80 bp, synthetic construct
  misc_feature 1..80: note = Artificially Synthesized Probe
  source 1..80: mol_type = other DNA
atccatcttagcacaggctagattagccagtgattttcaagtcgtaacttcttaacttctggcaggaatatggagcattt

SEQ ID NO: 139797 - DNA, 80 bp, synthetic construct; identical to SEQ ID NO: 43748
  misc_feature 1..80: note = Artificially Synthesized Probe
  source 1..80: mol_type = other DNA

SEQ ID NO: 139798 - DNA, 80 bp, synthetic construct
  misc_feature 1..80: note = Artificially Synthesized Probe
  source 1..80: mol_type = other DNA
tgccacactaaggctgtccgtcaaacaagcttttccgtgtcacacggaatgtgtcacctgatgcacaatgagactgcgat

SEQ ID NO: 139799 - DNA, 80 bp, synthetic construct
  misc_feature 1..80: note = Artificially Synthesized Probe
  source 1..80: mol_type = other DNA
tgccctcagctgtccactttgactctccacagaccatttgatgttgttatgcttttgttgtgttcaaaagttgaaatctc

SEQ ID NO: 139800 - DNA, 80 bp, synthetic construct
  misc_feature 1..80: note = Artificially Synthesized Probe
  source 1..80: mol_type = other DNA
ctcgccaggaggagacatgggggaagatagtattaggtaactaagactgctcagaatggggggaagatagtattagataa

SEQ ID NO: 139801 - DNA, 80 bp, synthetic construct
  misc_feature 1..80: note = Artificially Synthesized Probe
  source 1..80: mol_type = other DNA
ctgagagtgctcagaatggggggaagatagtattagataactaagagtgctcggaatgggggaagatagtattagttaac

SEQ ID NO: 139802 - DNA, 80 bp, synthetic construct; identical to SEQ ID NO: 43749
  misc_feature 1..80: note = Artificially Synthesized Probe
  source 1..80: mol_type = other DNA

SEQ ID NO: 139803 - DNA, 80 bp, synthetic construct
  misc_feature 1..80: note = Artificially Synthesized Probe
  source 1..80: mol_type = other DNA
ttcaaatcttgttctatattcagcaacttcgtttttgttttctcctgggcgaaaaatttactgtatcggtgcttttatgt

SEQ ID NO: 139804 - DNA, 80 bp, synthetic construct
  misc_feature 1..80: note = Artificially Synthesized Probe
  source 1..80: mol_type = other DNA
gcagggaagaatcctgcggtcatttattaccatgccatcttcatagtgtttgctgaaccaaggtgcagagtaatgattca

SEQ ID NO: 139805 - DNA, 80 bp, synthetic construct
  misc_feature 1..80: note = Artificially Synthesized Probe
  source 1..80: mol_type = other DNA
ttaaaagaaacagtgataagaaattgtgccctcttcccttctcctttccctgaccctctgaaaaataatcgcattaaact

SEQ ID NO: 139806 - DNA, 80 bp, synthetic construct; identical to SEQ ID NO: 43328
  misc_feature 1..80: note = Artificially Synthesized Probe
  source 1..80: mol_type = other DNA

SEQ ID NO: 139807 - DNA, 80 bp, synthetic construct; identical to SEQ ID NO: 43750
  misc_feature 1..80: note = Artificially Synthesized Probe
  source 1..80: mol_type = other DNA

SEQ ID NO: 139808 - DNA, 80 bp, synthetic construct
  misc_feature 1..80: note = Artificially Synthesized Probe
  source 1..80: mol_type = other DNA
tttttttgagacgtagtttcgctctgtcgcccaggctggagtgcagtggcgcgacctcgactcactgcaagctccgcctc

SEQ ID NO: 139809 - DNA, 80 bp, synthetic construct
  misc_feature 1..80: note = Artificially Synthesized Probe
  source 1..80: mol_type = other DNA
gcctcccaaagtgctgggattacaggcgtgagccactgcgcccggcgggttttttttttttaaatcaggcttcattggta

SEQ ID NO: 139810 - DNA, 80 bp, synthetic construct; identical to SEQ ID NO: 43751
  misc_feature 1..80: note = Artificially Synthesized Probe
  source 1..80: mol_type = other DNA

SEQ ID NO: 139811 - DNA, 80 bp, synthetic construct
  misc_feature 1..80: note = Artificially Synthesized Probe
  source 1..80: mol_type = other DNA
acttgtagctgcttggacatttcatttgtcatctaatacggcactgaaaaaattagttgtggcagctctcatgtaattta

SEQ ID NO: 139812 - DNA, 80 bp, synthetic construct
  misc_feature 1..80: note = Artificially Synthesized Probe
  source 1..80: mol_type = other DNA
agtttgtctctgttaccctgctttcattaccctttcaccaaacacaggattcgtctttgaacacagagcttcttttaaca

SEQ ID NO: 139813 - DNA, 80 bp, synthetic construct
  misc_feature 1..80: note = Artificially Synthesized Probe
  source 1..80: mol_type = other DNA
gtttagtgatgatgattgacgttcagtatggcaaatggaataggtagataccaatagaatggacctcagggtctcgttct

SEQ ID NO: 139814 - DNA, 80 bp, synthetic construct; identical to SEQ ID NO: 43752
  misc_feature 1..80: note = Artificially Synthesized Probe
  source 1..80: mol_type = other DNA

SEQ ID NO: 139815 - DNA, 80 bp, synthetic construct
  misc_feature 1..80: note = Artificially Synthesized Probe
  source 1..80: mol_type = other DNA
ttctttctctgaagaatcatgtacagtgtttaactgttattcaaatgtgttgcattggatagaaagtgctaaggtgcctt

SEQ ID NO: 139816 - DNA, 80 bp, synthetic construct
  misc_feature 1..80: note = Artificially Synthesized Probe
  source 1..80: mol_type = other DNA
ttattgcataggttatacaaagattgggatgagttaatagaaaacaaagaaaccagaggtggcaggaatgggtgagaggt

SEQ ID NO: 139817 - DNA, 80 bp, synthetic construct
  misc_feature 1..80: note = Artificially Synthesized Probe
  source 1..80: mol_type = other DNA
tgcaaaagtgatactgagagttctgaaaacccattctaagttttagcaagagcttttcaacctttgcagatgtattgcag

SEQ ID NO: 139818 - DNA, 80 bp, synthetic construct
  misc_feature 1..80: note = Artificially Synthesized Probe
  source 1..80: mol_type = other DNA
cacaggagagaattcataccatttgttgtgaaacaacatacctgaaagaatcagacctaccttgttcacacccaagatga

SEQ ID NO: 139819 - DNA, 80 bp, synthetic construct
  misc_feature 1..80: note = Artificially Synthesized Probe
  source 1..80: mol_type = other DNA
atacttaggcatgcaatgtacaaaaatgacaagaaagggtggtactttttccaaggtgaatgtgagttgactgattagct

SEQ ID NO: 139820 - DNA, 80 bp, synthetic construct; identical to SEQ ID NO: 43753
  misc_feature 1..80: note = Artificially Synthesized Probe
  source 1..80: mol_type = other DNA

SEQ ID NO: 139821 - DNA, 80 bp, synthetic construct
  misc_feature 1..80: note = Artificially Synthesized Probe
  source 1..80: mol_type = other DNA
cagtttaaagatgtagattagagcaaagcctcccactatggtactgagtgctcaagaaaagtctatatttagccattctg

SEQ ID NO: 139822 - DNA, 80 bp, synthetic construct
  misc_feature 1..80: note = Artificially Synthesized Probe
  source 1..80: mol_type = other DNA
ttcttaatcacacacccctcccctttttggtagcaaagattgtgttgctgacagactagggggaaagatgaagaaaaaaa

SEQ ID NO: 139823 - DNA, 80 bp, synthetic construct
  misc_feature 1..80: note = Artificially Synthesized Probe
  source 1..80: mol_type = other DNA
gaagcccgtccgtctcaagggaacattacagctcaaaggttaagacattattttacagtacaccaaggtaatgctcgcgc

SEQ ID NO: 139824 - DNA, 80 bp, synthetic construct; identical to SEQ ID NO: 43754
  misc_feature 1..80: note = Artificially Synthesized Probe
  source 1..80: mol_type = other DNA

SEQ ID NO: 139825 - DNA, 80 bp, synthetic construct
  misc_feature 1..80: note = Artificially Synthesized Probe
  source 1..80: mol_type = other DNA
atattactctccaacatcattaattaccagagtaatcaaagttatccctcatgggataaaacataaagctttgtgggttt

SEQ ID NO: 139826 - DNA, 80 bp, synthetic construct
  misc_feature 1..80: note = Artificially Synthesized Probe
  source 1..80: mol_type = other DNA
atataaaaattcttcatgtgaaacctgagaaacttgcagttcttatggctaattcacaaaataccacaggcccaattaca

SEQ ID NO: 139827 - DNA, 80 bp, synthetic construct
  misc_feature 1..80: note = Artificially Synthesized Probe
  source 1..80: mol_type = other DNA
cttccccatagtgtctgaggtttttttttccacgggaggtgaatacagcgatttctggcaagcaggtaattggattgact

SEQ ID NO: 139828 - DNA, 80 bp, synthetic construct
  misc_feature 1..80: note = Artificially Synthesized Probe
  source 1..80: mol_type = other DNA
attattaagtgttagggacaacgaaaaggtgatactgtgtaaaggaagggaagcaccatgcaagaacaaaaaattaacat

SEQ ID NO: 139829 - DNA, 80 bp, synthetic construct; identical to SEQ ID NO: 43755
  misc_feature 1..80: note = Artificially Synthesized Probe
  source 1..80: mol_type = other DNA

SEQ ID NO: 139830 - DNA, 80 bp, synthetic construct
  misc_feature 1..80: note = Artificially Synthesized Probe
  source 1..80: mol_type = other DNA
atgatcagaaactgttcctaatagccagctagacggatctgaatatgaagatttctataattttgttgtcagcttgtgat

SEQ ID NO: 139831 - DNA, 80 bp, synthetic construct
  misc_feature 1..80: note = Artificially Synthesized Probe
  source 1..80: mol_type = other DNA
taagatgcttgtcttttaaaatctaccgcttccacttcttctaaacctgttcgatgtgtcagtttacactgatgatttca

SEQ ID NO: 139832 - DNA, 80 bp, synthetic construct; identical to SEQ ID NO: 43756
  misc_feature 1..80: note = Artificially Synthesized Probe
  source 1..80: mol_type = other DNA

SEQ ID NO: 139833 - DNA, 80 bp, synthetic construct
  misc_feature 1..80: note = Artificially Synthesized Probe
  source 1..80: mol_type = other DNA
tttttttaaatatcttatgaatacttgaaagttttgagttttgcagattatctctcagcctatttctaagcacaggggcc

SEQ ID NO: 139834 - DNA, 80 bp, synthetic construct
  misc_feature 1..80: note = Artificially Synthesized Probe
  source 1..80: mol_type = other DNA
tttggttcaatctcagttttctcataagcggaatttcttgttttcaagctatggaaatgagttgtatgcagttgaatttg

SEQ ID NO: 139835 - DNA, 80 bp, synthetic construct
  misc_feature 1..80: note = Artificially Synthesized Probe
  source 1..80: mol_type = other DNA
caaaattctgtgctgcattttatccctcagatagctcatgtgaactgggatgaagtagctttgatcacgtggagtgatgt

SEQ ID NO: 139836 - DNA, 80 bp, synthetic construct
  misc_feature 1..80: note = Artificially Synthesized Probe
  source 1..80: mol_type = other DNA
gagtggctacgggttgattccccatgtttaatatactaaaaaaagatactgggtattgatctgtgttcaaaatggggtgg

SEQ ID NO: 139837 - DNA, 80 bp, synthetic construct; identical to SEQ ID NO: 43757
  misc_feature 1..80: note = Artificially Synthesized Probe
  source 1..80: mol_type = other DNA

SEQ ID NO: 139838 - DNA, 80 bp, synthetic construct
  misc_feature 1..80: note = Artificially Synthesized Probe
  source 1..80: mol_type = other DNA
tagttttacaaatacctttgcaagcacttttatgaaccatggtctgtggaattgatggttcagtgacttgcagctaaagt

SEQ ID NO: 139839 - DNA, 80 bp, synthetic construct
  misc_feature 1..80: note = Artificially Synthesized Probe
  source 1..80: mol_type = other DNA
taatacttctaatccagacttctaaacaacattctaatttgtgaaaaacagctttgaaacatgctgtgacaaagcacatg

SEQ ID NO: 139840 - DNA, 80 bp, synthetic construct
  misc_feature 1..80: note = Artificially Synthesized Probe
  source 1..80: mol_type = other DNA
gctacaggccaagcatgcactacggggcacttggtgcagtctgttcctaatactcgcagtatcccgcaaggtgtcagtgc

SEQ ID NO: 139841 - DNA, 80 bp, synthetic construct
  misc_feature 1..80: note = Artificially Synthesized Probe
  source 1..80: mol_type = other DNA
gttaaaagccttaccacgttcctaagtgattgccagttattattatgaaaaagaagacactaacgaccataggaaaagct

SEQ ID NO: 139842 - DNA, 80 bp, synthetic construct; identical to SEQ ID NO: 43758
  misc_feature 1..80: note = Artificially Synthesized Probe
  source 1..80: mol_type = other DNA

SEQ ID NO: 139843 - DNA, 80 bp, synthetic construct
  misc_feature 1..80: note = Artificially Synthesized Probe
  source 1..80: mol_type = other DNA
ggaacagtgttgattgaccacaattacagccacctagtggacgatcagcatccccatttttatataaagccacattcatt

SEQ ID NO: 139844 - DNA, 80 bp, synthetic construct
  misc_feature 1..80: note = Artificially Synthesized Probe
  source 1..80: mol_type = other DNA
ctttagataatttgcatttcattctttttaggtatctgattgatacatatttggcctttctgaatatcccttgccctttg

SEQ ID NO: 139845 - DNA, 80 bp, synthetic construct
  misc_feature 1..80: note = Artificially Synthesized Probe
  source 1..80: mol_type = other DNA
ctggccagccttctcatttctgtaacaacagtaaaagtaaaatgtagaagtaaaagacagttcagccttatgatttttgt

SEQ ID NO: 139846 - DNA, 80 bp, synthetic construct; identical to SEQ ID NO: 43759
  misc_feature 1..80: note = Artificially Synthesized Probe
  source 1..80: mol_type = other DNA

SEQ ID NO: 139847 - DNA, 80 bp, synthetic construct
  misc_feature 1..80: note = Artificially Synthesized Probe
  source 1..80: mol_type = other DNA
cacaaccaagttagagaacgtttccattaccccaaaaagttgcctagtgccactcttcagtaaatctcttctcctagcac

SEQ ID NO: 139848 - DNA, 80 bp, synthetic construct
  misc_feature 1..80: note = Artificially Synthesized Probe
  source 1..80: mol_type = other DNA
tgcgtgtaccagtatgtttgcctgtctcctggtgatggacattaggttgcttccagttgtgggtgattaggaatcaccct

SEQ ID NO: 139849 - DNA, 80 bp, synthetic construct; identical to SEQ ID NO: 43329
  misc_feature 1..80: note = Artificially Synthesized Probe
  source 1..80: mol_type = other DNA

SEQ ID NO: 139850 - DNA, 80 bp, synthetic construct; identical to SEQ ID NO: 43760
  misc_feature 1..80: note = Artificially Synthesized Probe
  source 1..80: mol_type = other DNA

SEQ ID NO: 139851 - DNA, 80 bp, synthetic construct
  misc_feature 1..80: note = Artificially Synthesized Probe
  source 1..80: mol_type = other DNA
tctacataacagcctgccagatatttggaggctgttttcctgtccttatttccacccctcaaatctatctttgccaagcc

SEQ ID NO: 139852 - DNA, 80 bp, synthetic construct
  misc_feature 1..80: note = Artificially Synthesized Probe
  source 1..80: mol_type = other DNA
aatgcagtgttctgctttgcaagtgccgtgttgtcttaaagcagcaaagtttgggtttgcttctgtagcagccatatcag

SEQ ID NO: 139853 - DNA, 80 bp, synthetic construct
  misc_feature 1..80: note = Artificially Synthesized Probe
  source 1..80: mol_type = other DNA
atttacaggggaaccagctagtttgataatcaatgatagagttttctaaattgctaaactgctccgtttactttgaacac

SEQ ID NO: 139854 - DNA, 80 bp, synthetic construct
  misc_feature 1..80: note = Artificially Synthesized Probe
  source 1..80: mol_type = other DNA
gagagcagttgacctcttccgacatctttagaatcttatgtaaggttttcataatttacagaactgatattagatccagt

SEQ ID NO: 139855 - DNA, 80 bp, synthetic construct; identical to SEQ ID NO: 43761
  misc_feature 1..80: note = Artificially Synthesized Probe
  source 1..80: mol_type = other DNA

SEQ ID NO: 139856 - DNA, 80 bp, synthetic construct
  misc_feature 1..80: note = Artificially Synthesized Probe
  source 1..80: mol_type = other DNA
aaataaccctgaactattcccgtcactatggcccgtgtcaaaaacttgcggattgttgtgatcatgaggtttccattgat

SEQ ID NO: 139857 - DNA, 80 bp, synthetic construct
  misc_feature 1..80: note = Artificially Synthesized Probe
  source 1..80: mol_type = other DNA
catgtacttaatattctgaccaacactgaagacttatttgtacatcatagttcttccaggtacttcaccatactccacac

SEQ ID NO: 139858 - DNA, 80 bp, synthetic construct; identical to SEQ ID NO: 43762
  misc_feature 1..80: note = Artificially Synthesized Probe
  source 1..80: mol_type = other DNA

SEQ ID NO: 139859 - DNA, 80 bp, synthetic construct
  misc_feature 1..80: note = Artificially Synthesized Probe
  source 1..80: mol_type = other DNA
tttctaatgtgtctggtatcaaaaagaatacacaattgatcggcattagttgtataatttgaacagtgcccaccctgctc

SEQ ID NO: 139860 - DNA, 80 bp, synthetic construct
  misc_feature 1..80: note = Artificially Synthesized Probe
  source 1..80: mol_type = other DNA
cataacatgtgcctgtgtatgtgcatgcacacgtgtatgaaaaaatgtgcagatgtgatcgtctcagcagaaagttttat

SEQ ID NO: 139861 - DNA, 80 bp, synthetic construct
  misc_feature 1..80: note = Artificially Synthesized Probe
  source 1..80: mol_type = other DNA
tcaacttgtctgagtgtttaaattcctttttcaggcttaagttggggcattcagcaaaacaattgtcaagtccctggcct

SEQ ID NO: 139862 - DNA, 80 bp, synthetic construct
  misc_feature 1..80: note = Artificially Synthesized Probe
  source 1..80: mol_type = other DNA
agcacccaattttatcatcattgtcttttgttctccacagtgctattcatgtggctgttttatgaatgccagagtctggg

SEQ ID NO: 139863 - DNA, 80 bp, synthetic construct; identical to SEQ ID NO: 43763
  misc_feature 1..80: note = Artificially Synthesized Probe
  source 1..80: mol_type = other DNA

SEQ ID NO: 139864 - DNA, 80 bp, synthetic construct
  misc_feature 1..80: note = Artificially Synthesized Probe
  source 1..80: mol_type = other DNA
agaggattattgcttttattcatacagtagtttccagatataataatcctggtttaacagtttgcttctcgagtatagct

SEQ ID NO: 139865 - DNA, 80 bp, synthetic construct
  misc_feature 1..80: note = Artificially Synthesized Probe
  source 1..80: mol_type = other DNA
accagctccaacatggcttcttttgaggattctgaatttccattcaaatgatccgaagtcattcttatttgagatcacac

SEQ ID NO: 139866 - DNA, 80 bp, synthetic construct
  misc_feature 1..80: note = Artificially Synthesized Probe
  source 1..80: mol_type = other DNA
tttcatatcataacagaaaatttaaaaatacagcaacatgggaccaatcactgtatcatgtttcctatagactaagcggt

SEQ ID NO: 139867 - DNA, 80 bp, synthetic construct
  misc_feature 1..80: note = Artificially Synthesized Probe
  source 1..80: mol_type = other DNA
cactgtgcatccctccactcattttagccaacgctgcttcacttttactgccttatattgtgaagttcttggggagattt

SEQ ID NO: 139868 - DNA, 80 bp, synthetic construct; identical to SEQ ID NO: 43764
  misc_feature 1..80: note = Artificially Synthesized Probe
  source 1..80: mol_type = other DNA

SEQ ID NO: 139869 - DNA, 80 bp, synthetic construct
  misc_feature 1..80: note = Artificially Synthesized Probe
  source 1..80: mol_type = other DNA
taaattatgttcatggcagttactctgtaggttaaaaagtatctgaagaaaaagggaaggaaaccttctatattaatagg

SEQ ID NO: 139870 - DNA, 80 bp, synthetic construct
  misc_feature 1..80: note = Artificially Synthesized Probe
  source 1..80: mol_type = other DNA
agctatgtgtatgtgtgcgtttgtagaacaagcattctagagtccagaattgtattttttagaattatgacagcattgaa

SEQ ID NO: 139871 - DNA, 80 bp, synthetic construct
  misc_feature 1..80: note = Artificially Synthesized Probe
  source 1..80: mol_type = other DNA
gttttttgcttatatgacatattgggaaacggattatgtatggttgatctgtgggggtttaatgactagcaggacgatgt

SEQ ID NO: 139872 - DNA, 80 bp, synthetic construct
  misc_feature 1..80: note = Artificially Synthesized Probe
  source 1..80: mol_type = other DNA
cagagccagggaccctctgccttctgcccttctgcggcctcacgttgaaggtgactctgctgccagcaccctggcccagc

SEQ ID NO: 139873 - DNA, 80 bp, synthetic construct
  misc_feature 1..80: note = Artificially Synthesized Probe
  source 1..80: mol_type = other DNA
tagctcctactaatagacaccttggcactctgtaaattaagtaagacaacaactgttagatcaccagcgtaatgcaaacg

SEQ ID NO: 139874 - DNA, 80 bp, synthetic construct; identical to SEQ ID NO: 43765
  misc_feature 1..80: note = Artificially Synthesized Probe
  source 1..80: mol_type = other DNA

SEQ ID NO: 139875 - DNA, 80 bp, synthetic construct
  misc_feature 1..80: note = Artificially Synthesized Probe
  source 1..80: mol_type = other DNA
ataactcgttaaccacgtgctcaagaggaaaatgaccagaatcatagactcagatcctaatgcagctgaagctgacacct

SEQ ID NO: 139876 - DNA, 80 bp, synthetic construct
  misc_feature 1..80: note = Artificially Synthesized Probe
  source 1..80: mol_type = other DNA
tttgccatggttggtccctctcttctttcttcccttccatgacctcaggtcttgactttttggctttcttgactggctct

SEQ ID NO: 139877 - DNA, 80 bp, synthetic construct
  misc_feature 1..80: note = Artificially Synthesized Probe
  source 1..80: mol_type = other DNA
ggcctgaagcatgttgccagtaataactgacaggactctaactctcagctcgatgtgaaaacaagagatgctttcatgag

SEQ ID NO: 139878 - DNA, 80 bp, synthetic construct; identical to SEQ ID NO: 43766
  misc_feature 1..80: note = Artificially Synthesized Probe
  source 1..80: mol_type = other DNA

SEQ ID NO: 139879 - DNA, 80 bp, synthetic construct
  misc_feature 1..80: note = Artificially Synthesized Probe
  source 1..80: mol_type = other DNA
agtgctgccagccacgctccttgacaggaaatctgagtggtgagtgctcatggccacctcgttgtttttccaaataacac

SEQ ID NO: 139880 - DNA, 80 bp, synthetic construct
  misc_feature 1..80: note = Artificially Synthesized Probe
  source 1..80: mol_type = other DNA
gtaattgcccagaaagttcatgttgtttgcatttggaggaactgagtatcaggtagtatgttgggtggctaagagctgaa

SEQ ID NO: 139881 - DNA, 80 bp, synthetic construct; identical to SEQ ID NO: 43767
  misc_feature 1..80: note = Artificially Synthesized Probe
  source 1..80: mol_type = other DNA

SEQ ID NO: 139882 - DNA, 80 bp, synthetic construct
  misc_feature 1..80: note = Artificially Synthesized Probe
  source 1..80: mol_type = other DNA
gtgaattaggtacccttcagtgttgcagaaaaagtatcataggttgttccctatttcatgtgtttcaaagggatagggca

SEQ ID NO: 139883 - DNA, 80 bp, synthetic construct
  misc_feature 1..80: note = Artificially Synthesized Probe
  source 1..80: mol_type = other DNA
tctagagccatgcagaatgaacctgttctcccttccacatgatagtcctttaagtattcgtaaactgaagccattcttta

SEQ ID NO: 139884 - DNA, 80 bp, synthetic construct
  misc_feature 1..80: note = Artificially Synthesized Probe
  source 1..80: mol_type = other DNA
tacttgtattgatgtagccacatcagtgtattgatcctaccagtggctagaacttggaagtcattttctgtcatactttg

SEQ ID NO: 139885 - DNA, 80 bp, synthetic construct
  misc_feature 1..80: note = Artificially Synthesized Probe
  source 1..80: mol_type = other DNA
tattagttacattacataccaatttcaggtgatatgaactgaactataatgcattaaacttaaaataatagtaattatta

SEQ ID NO: 139886 - DNA, 80 bp, synthetic construct
  misc_feature 1..80: note = Artificially Synthesized Probe
  source 1..80: mol_type = other DNA
actgtctagaattatgaaaagtctaaaattttatccagcttgcaaatattctgccacagtttatggatactggcagaaga

SEQ ID NO: 139887 - DNA, 80 bp, synthetic construct; identical to SEQ ID NO: 43768
  misc_feature 1..80: note = Artificially Synthesized Probe
  source 1..80: mol_type = other DNA

SEQ ID NO: 139888 - DNA, 80 bp, synthetic construct
  misc_feature 1..80: note = Artificially Synthesized Probe
  source 1..80: mol_type = other DNA
ctatggagatttctctttctatagtaacttccaggtgtcctgaggaatcaaacccaagcatgctgacaccagagctcatg

SEQ ID NO: 139889 - DNA, 80 bp, synthetic construct
  misc_feature 1..80: note = Artificially Synthesized Probe
  source 1..80: mol_type = other DNA
gcaggaaagatgagcacacgtatggataattaagattcagtgtgataggctggaagtatgtacgacaggctgtgtgggtg

SEQ ID NO: 139890 - DNA, 80 bp, synthetic construct; identical to SEQ ID NO: 43769
  misc_feature 1..80: note = Artificially Synthesized Probe
  source 1..80: mol_type = other DNA

SEQ ID NO: 139891 - DNA, 80 bp, synthetic construct
  misc_feature 1..80: note = Artificially Synthesized Probe
  source 1..80: mol_type = other DNA
gatagcaacagaaccacatgagcagtgaaagaaacatattcagggttctagagaagagagaattgatatgcaatggaatc

SEQ ID NO: 139892 - DNA, 80 bp, synthetic construct
  misc_feature 1..80: note = Artificially Synthesized Probe
  source 1..80: mol_type = other DNA
ggagctatgtgagacatgtccgaggggcttttctccagggaactccctaaaaagcagagaccaccacatgtcatcagaac

SEQ ID NO: 139893 - DNA, 80 bp, synthetic construct; identical to SEQ ID NO: 43330
  misc_feature 1..80: note = Artificially Synthesized Probe
  source 1..80: mol_type = other DNA

SEQ ID NO: 139894 - DNA, 80 bp, synthetic construct
  misc_feature 1..80: note = Artificially Synthesized Probe
  source 1..80: mol_type = other DNA
gacctttggataaggaacgtgatgaggagaatggaaatggaaggctacccttgtcaaacaccgctagcagtgcttgcata

SEQ ID NO: 139895 - DNA, 80 bp, synthetic construct; identical to SEQ ID NO: 43770
  misc_feature 1..80: note = Artificially Synthesized Probe
  source 1..80: mol_type = other DNA

SEQ ID NO: 139896 - DNA, 80 bp, synthetic construct
  misc_feature 1..80: note = Artificially Synthesized Probe
  source 1..80: mol_type = other DNA
cccttgaagatcctccaccagtgtcaggcctgtagctttatttttgggactgggaagttccggcagaagaagtggccctt

SEQ ID NO: 139897 - DNA, 80 bp, synthetic construct
  misc_feature 1..80: note = Artificially Synthesized Probe
  source 1..80: mol_type = other DNA
tttcttaggtacctgagtttggattacacataatgaattcagttttccacttgttcacgtcaccattcccacacaaagtg

SEQ ID NO: 139898 - DNA, 80 bp, synthetic construct
  misc_feature 1..80: note = Artificially Synthesized Probe
  source 1..80: mol_type = other DNA
ctttcaaacaggcttttagtgaaaaggcgaaatagtgttgcctgtttaacaaagcctttaatttccctgataaactgcta

SEQ ID NO: 139899 - DNA, 80 bp, synthetic construct; identical to SEQ ID NO: 43771
  misc_feature 1..80: note = Artificially Synthesized Probe
  source 1..80: mol_type = other DNA

SEQ ID NO: 139900 - DNA, 80 bp, synthetic construct
  misc_feature 1..80: note = Artificially Synthesized Probe
  source 1..80: mol_type = other DNA
aatattcatttggattgtgctttctaaaaggatctccctctgaacttcccttgcttctcagaaaagctaggtcaggtgtg

SEQ ID NO: 139901 - DNA, 80 bp, synthetic construct
  misc_feature 1..80: note = Artificially Synthesized Probe
  source 1..80: mol_type = other DNA
gttaagctttattatcccaggggtatgttattctgtagagcccaagccacagatactctgcaactttcaagaggaattta

SEQ ID NO: 139902 - DNA, 80 bp, synthetic construct
  misc_feature 1..80: note = Artificially Synthesized Probe
  source 1..80: mol_type = other DNA
gaggctctcccaagtccatccaggtagatccaaggaaggactgagggccatcgtcccctcaccttcatggccctgtgtcc

SEQ ID NO: 139903 - DNA, 80 bp, synthetic construct
  misc_feature 1..80: note = Artificially Synthesized Probe
  source 1..80: mol_type = other DNA
gggccttcccgagttgctatccacagggtgctggaggtctcctggcacacaccaactccgttggaaagagcagccatgtg

SEQ ID NO: 139904 - DNA, 80 bp, synthetic construct; identical to SEQ ID NO: 43772
  misc_feature 1..80: note = Artificially Synthesized Probe
  source 1..80: mol_type = other DNA

SEQ ID NO: 139905 - DNA, 80 bp, synthetic construct
  misc_feature 1..80: note = Artificially Synthesized Probe
  source 1..80: mol_type = other DNA
atttctcaaatagtcttgattaataatataaaaaaattgggcagtcacatttttaaagtgaaattattactcagaatact

SEQ ID NO: 139906 - DNA, 80 bp, synthetic construct
  misc_feature 1..80: note = Artificially Synthesized Probe
  source 1..80: mol_type = other DNA
gggttttgccagaaaaagaaaaaggaaaaagttgaatctgtcttgttagccttttaaagtagccttgttagatgcatgcc

SEQ ID NO: 139907 - DNA, 80 bp, synthetic construct
  misc_feature 1..80: note = Artificially Synthesized Probe
  source 1..80: mol_type = other DNA
cctaatttcctgattccataagaatgcctattccagtttgttacgtctttaagtcaaacagaggcagccttacagtaagc

SEQ ID NO: 139908 - DNA, 80 bp, synthetic construct
  misc_feature 1..80: note = Artificially Synthesized Probe
  source 1..80: mol_type = other DNA
acgtgtcggcacacaggagcagaaggcttgcactggaaggagaggccagggtgtctccaagagggacaccccccttccca

SEQ ID NO: 139909 - DNA, 80 bp, synthetic construct; identical to SEQ ID NO: 43773
  misc_feature 1..80: note = Artificially Synthesized Probe
  source 1..80: mol_type = other DNA

SEQ ID NO: 139910 - DNA, 80 bp, synthetic construct
  misc_feature 1..80: note = Artificially Synthesized Probe
  source 1..80: mol_type = other DNA
taaccttaaagcacgcattctcatcttcctgagtgagatttgtgtgcatcacctctattactgttagatcttcatgcatg

SEQ ID NO: 139911 - DNA, 80 bp, synthetic construct
  misc_feature 1..80: note = Artificially Synthesized Probe
  source 1..80: mol_type = other DNA
ggcccatggagactattcttggtaaagttagaaacctgcatgattatgtatttccaactcgagataaaatttagtcttca

SEQ ID NO: 139912 - DNA, 80 bp, synthetic construct
  misc_feature 1..80: note = Artificially Synthesized Probe
  source 1..80: mol_type = other DNA
aattgcatggtatatccaaagaaattgtgtatttgaatgtatgtgaaagaatttttcggaaatggtgtgaatctcagcta

SEQ ID NO: 139913 - DNA, 80 bp, synthetic construct; identical to SEQ ID NO: 43774
  misc_feature 1..80: note = Artificially Synthesized Probe
  source 1..80: mol_type = other DNA

SEQ ID NO: 139914 - DNA, 80 bp, synthetic construct
  misc_feature 1..80: note = Artificially Synthesized Probe
  source 1..80: mol_type = other DNA
tactgaccaaccaacctgtgttcttaaaaacttttttaaaaaaggagaaattgccatttggttactggaatataaaacta

SEQ ID NO: 139915 - DNA, 80 bp, synthetic construct
  misc_feature 1..80: note = Artificially Synthesized Probe
  source 1..80: mol_type = other DNA
gtaccagtgttaacatagaaagcatcacttcttcaaaaccagagtccagtgggagctctgtaacaggacatcttgcataa

SEQ ID NO: 139916 - DNA, 80 bp, synthetic construct
  misc_feature 1..80: note = Artificially Synthesized Probe
  source 1..80: mol_type = other DNA
atgctcatcaactgcacgttttgtgtttttcattaacacgtagttttagggttgtgacaaaaactgccttttaaagtttt

SEQ ID NO: 139917 - DNA, 80 bp, synthetic construct
  misc_feature 1..80: note = Artificially Synthesized Probe
  source 1..80: mol_type = other DNA
tttttcctgctttcacttgagaaacttataagcttttgtgacattaaaatatggctctaatttattagcataatctgtta

SEQ ID NO: 139918 - DNA, 80 bp, synthetic construct; identical to SEQ ID NO: 43775
  misc_feature 1..80: note = Artificially Synthesized Probe
  source 1..80: mol_type = other DNA

SEQ ID NO: 139919 - DNA, 80 bp, synthetic construct
  misc_feature 1..80: note = Artificially Synthesized Probe
  source 1..80: mol_type = other DNA
cacgtctttttaatgccatctttatctgctacgtgatgcatgaaatctactttcggttttagaactgctaacaacctttg

SEQ ID NO: 139920 - DNA, 80 bp, synthetic construct
  misc_feature 1..80: note = Artificially Synthesized Probe
  source 1..80: mol_type = other DNA
caagtttttttttaaaccaagctgaggcttccacaaattacttgccacagatgagatgaagttgttgaagtggtgttaga

SEQ ID NO: 139921 - DNA, 80 bp, synthetic construct
  misc_feature 1..80: note = Artificially Synthesized Probe
  source 1..80: mol_type = other DNA
ccatttagattgtgtgtagagcacagaaaatgccatattcaggatggtactaaaagtgccattcgtgtattttatggatg

SEQ ID NO: 139922 - DNA, 80 bp, synthetic construct; identical to SEQ ID NO: 43776
  misc_feature 1..80: note = Artificially Synthesized Probe
  source 1..80: mol_type = other DNA

SEQ ID NO: 139923 - DNA, 80 bp, synthetic construct
  misc_feature 1..80: note = Artificially Synthesized Probe
  source 1..80: mol_type = other DNA
tcaagcacgcagaaggagctgcagcatcataatggcatcccagagcagcgagccgaactcaaaatcctctccccaaaagc

SEQ ID NO: 139924 - DNA, 80 bp, synthetic construct
  misc_feature 1..80: note = Artificially Synthesized Probe
  source 1..80: mol_type = other DNA
tcactgtgccttctacgcaaagctgcttattgccctgttgaaaacagacccaaaaaagaatgattttaggcacactgttt

SEQ ID NO: 139925 - DNA, 80 bp, synthetic construct; identical to SEQ ID NO: 43777
  misc_feature 1..80: note = Artificially Synthesized Probe
  source 1..80: mol_type = other DNA

SEQ ID NO: 139926 - DNA, 80 bp, synthetic construct
  misc_feature 1..80: note = Artificially Synthesized Probe
  source 1..80: mol_type = other DNA
tcaatctgattgaggctgttacattttataggtgctatttttcaaagcagtactgacagcactcgaagttattaaattgc

SEQ ID NO: 139927 - DNA, 80 bp, synthetic construct
  misc_feature 1..80: note = Artificially Synthesized Probe
  source 1..80: mol_type = other DNA
aattcctattaggtcgttaggattaagagttcagaatttaagttttgtgtactcaaggtttacctgctcatgtcatggta

SEQ ID NO: 139928 - DNA, 80 bp, synthetic construct
  misc_feature 1..80: note = Artificially Synthesized Probe
  source 1..80: mol_type = other DNA
gcttaacccacctctggattaaaatacattcagtaagtagttcagaatagcataattatcagtgctgcaagggatccaaa

SEQ ID NO: 139929 - DNA, 80 bp, synthetic construct
  misc_feature 1..80: note = Artificially Synthesized Probe
  source 1..80: mol_type = other DNA
cagtatgtccttttctgtaattaaaattaatgggggaggggaatgaccagaaggctgccttctttgtttttgtgtcctta

SEQ ID NO: 139930 - DNA, 80 bp, synthetic construct; identical to SEQ ID NO: 43778
  misc_feature 1..80: note = Artificially Synthesized Probe
  source 1..80: mol_type = other DNA

SEQ ID NO: 139931 - DNA, 80 bp, synthetic construct
  misc_feature 1..80: note = Artificially Synthesized Probe
  source 1..80: mol_type = other DNA
ccctgcccgtgggacctgcacgcccaccctcatttcagctcagcttttaaactctgatcttccctcggtcaaggcaccag

SEQ ID NO: 139932 - DNA, 80 bp, synthetic construct
  misc_feature 1..80: note = Artificially Synthesized Probe
  source 1..80: mol_type = other DNA
cttgaatacctgtaactgctagcaccaaacctcaggaagaggaagtcgtgttccggaagtgcctgctacccgaagcacac

SEQ ID NO: 139933 - DNA, 80 bp, synthetic construct
  misc_feature 1..80: note = Artificially Synthesized Probe
  source 1..80: mol_type = other DNA
aagacgcagtgctttcctctgcctggtgcgtgagggccaggccaggcctggctcccccctgcggttcactagcccggcgg

SEQ ID NO: 139934 - DNA, 80 bp, synthetic construct
  misc_feature 1..80: note = Artificially Synthesized Probe
  source 1..80: mol_type = other DNA
gagtgcgatggcgcggtctcggctcactgcgagctccgcctcccgggttcccgccattctcctgcctcagcctcccgagt

SEQ ID NO: 139935 - DNA, 80 bp, synthetic construct; identical to SEQ ID NO: 43779
  misc_feature 1..80: note = Artificially Synthesized Probe
  source 1..80: mol_type = other DNA

SEQ ID NO: 139936 - DNA, 80 bp, synthetic construct
  misc_feature 1..80: note = Artificially Synthesized Probe
  source 1..80: mol_type = other DNA
ctggggtctgtgctcagaattaactcggtattgaaagaaatgctttcttgcagaacaccaccaacacgataagcaaaatg

SEQ ID NO: 139937 - DNA, 80 bp, synthetic construct
  misc_feature 1..80: note = Artificially Synthesized Probe
  source 1..80: mol_type = other DNA
aaatgtttgctgtgggtcacctatcgatcattctcttatttaggagggatggagtcgattagaaaaccgatggaaaattg

SEQ ID NO: 139938 - DNA, 80 bp, synthetic construct; identical to SEQ ID NO: 43331
  misc_feature 1..80: note = Artificially Synthesized Probe
  source 1..80: mol_type = other DNA

SEQ ID NO: 139939 - DNA, 80 bp, synthetic construct; identical to SEQ ID NO: 43780
  misc_feature 1..80: note = Artificially Synthesized Probe
  source 1..80: mol_type = other DNA

SEQ ID NO: 139940 - DNA, 80 bp, synthetic construct
  misc_feature 1..80: note = Artificially Synthesized Probe
  source 1..80: mol_type = other DNA
cagaccaggggatgcacccagctccggctctcccctcctcactctcgtcctgctcaccccctcttttctctcctggtctc

SEQ ID NO: 139941 - DNA, 80 bp, synthetic construct
  misc_feature 1..80: note = Artificially Synthesized Probe
  source 1..80: mol_type = other DNA
tctgcagcccatagcccaggtaccttagtgcagggtggaggaagccttgggcaacctgctctgtgatgagcaacctattc

SEQ ID NO: 139942 - DNA, 80 bp, synthetic construct
  misc_feature 1..80: note = Artificially Synthesized Probe
  source 1..80: mol_type = other DNA
tttcgtttttacatctttccctgaatattctttcctgaatgtatggcttctttgtctctgtgtcttgtcaccttatgttg

SEQ ID NO: 139943 - DNA, 80 bp, synthetic construct
  misc_feature 1..80: note = Artificially Synthesized Probe
  source 1..80: mol_type = other DNA
gaccctgtgtctgcatgtgcccagcaccctgcagagtgccctgcatgctgccaggacacggcgactcacatggccgcaca

SEQ ID NO: 139944 - DNA, 80 bp, synthetic construct; identical to SEQ ID NO: 43781
  misc_feature 1..80: note = Artificially Synthesized Probe
  source 1..80: mol_type = other DNA

SEQ ID NO: 139945 - DNA, 80 bp, synthetic construct
  misc_feature 1..80: note = Artificially Synthesized Probe
  source 1..80: mol_type = other DNA
acccctgcaaagagttgtattggacagctcacagggctgtggggaaatgcacacccagtattaactgtgtgtgcccttga

SEQ ID NO: 139946 - DNA, 80 bp, synthetic construct
  misc_feature 1..80: note = Artificially Synthesized Probe
  source 1..80: mol_type = other DNA
ttttccaggctctaactggtccctgtctcccttaggcattgtttccaagtcgtacgagtgccgtctaaagggacaaggag

SEQ ID NO: 139947 - DNA, 80 bp, synthetic construct
  misc_feature 1..80: note = Artificially Synthesized Probe
  source 1..80: mol_type = other DNA
ggacccctcggtggaggagacggccgccgccacgctgcagacgctggccatggccggccaggtggcccgggtggtgcata

SEQ ID NO: 139948 - DNA, 80 bp, synthetic construct
  misc_feature 1..80: note = Artificially Synthesized Probe
  source 1..80: mol_type = other DNA
tttttattacatccatgatctttacctttatttctttcagtagtcaaaaacgtaaaaatctcgatgacttacaaaagtta

SEQ ID NO: 139949 - DNA, 80 bp, synthetic construct; identical to SEQ ID NO: 43782
  misc_feature 1..80: note = Artificially Synthesized Probe
  source 1..80: mol_type = other DNA

SEQ ID NO: 139950 - DNA, 80 bp, synthetic construct
  misc_feature 1..80: note = Artificially Synthesized Probe
  source 1..80: mol_type = other DNA
cgagatccagatgttcccacaggcccaggagagcccggccgccgtggaggtgctcacccaggtggtccatccctcagcag

SEQ ID NO: 139951 - DNA, 80 bp, synthetic construct
  misc_feature 1..80: note = Artificially Synthesized Probe
  source 1..80: mol_type = other DNA
ggagggtgcccagatcatcatgcaggaggcgcagggcgagcacatggatctggtggagtccgacggggagatctcgcaga

SEQ ID NO: 139952 - DNA, 80 bp, synthetic construct
  misc_feature 1..80: note = Artificially Synthesized Probe
  source 1..80: mol_type = other DNA
actcctgcaggccggggccacgctaggcacagaggccggggccccaagcagggcagagcagctggccagcgtggtcatct

SEQ ID NO: 139953 - DNA, 80 bp, synthetic construct; identical to SEQ ID NO: 43783
  misc_feature 1..80: note = Artificially Synthesized Probe
  source 1..80: mol_type = other DNA

SEQ ID NO: 139954 - DNA, 80 bp, synthetic construct
  misc_feature 1..80: note = Artificially Synthesized Probe
  source 1..80: mol_type = other DNA
gttgttggtgtttttctctcccaagtgttttcccatttcagttatcagaaggtcatggccgtggggaaagtggtgaagat

SEQ ID NO: 139955 - DNA, 80 bp, synthetic construct
  misc_feature 1..80: note = Artificially Synthesized Probe
  source 1..80: mol_type = other DNA
cccataccaaaggaagcctgctagctcatttcatgtataaatttcccatcttcaaacagtttaggtgtatttgttgctct

SEQ ID NO: 139956 - DNA, 80 bp, synthetic construct
  misc_feature 1..80: note = Artificially Synthesized Probe
  source 1..80: mol_type = other DNA
gatattgttcctatcaatattttgctttttataacaagggtttgttcatattgatgccatttttgcaggatttcttcgtg

SEQ ID NO: 139957 - DNA, 80 bp, synthetic construct
  misc_feature 1..80: note = Artificially Synthesized Probe
  source 1..80: mol_type = other DNA
ccttgattaacttttatctcacttgttgatttccatagctttgtggattgcttaccttatccttcttatccccattttac

SEQ ID NO: 139958 - DNA, 80 bp, synthetic construct; identical to SEQ ID NO: 43784
  misc_feature 1..80: note = Artificially Synthesized Probe
  source 1..80: mol_type = other DNA

SEQ ID NO: 139959 - DNA, 80 bp, synthetic construct
  misc_feature 1..80: note = Artificially Synthesized Probe
  source 1..80: mol_type = other DNA
tttctctctaggttgttttcactgcatgtaggaaatgtaacttatctactttctcctaccatccacttttattttctgct

SEQ ID NO: 139960 - DNA, 80 bp, synthetic construct
  misc_feature 1..80: note = Artificially Synthesized Probe
  source 1..80: mol_type = other DNA
ttttgaggtatatactacattttattgatttatgggacactcaaatttaggataaatagcttgtgcaaggcgacacagct

SEQ ID NO: 139961 - DNA, 80 bp, synthetic construct
  misc_feature 1..80: note = Artificially Synthesized Probe
  source 1..80: mol_type = other DNA
tgtgttgattattgcatttacttgtgggttacaaactgaacatatttgtataatagcaggaggtaagggtctaaaagtat

SEQ ID NO: 139962 - DNA, 80 bp, synthetic construct; identical to SEQ ID NO: 43332
  misc_feature 1..80: note = Artificially Synthesized Probe
  source 1..80: mol_type = other DNA

SEQ ID NO: 139963 - DNA, 80 bp, synthetic construct
  misc_feature 1..80: note = Artificially Synthesized Probe
  source 1..80: mol_type = other DNA
catctgggttcatgaaaagattccagacattttaaaattgtgtattaatgtgcttatgaactgtttattcctagttggtt

SEQ ID NO: 139964 - DNA, 80 bp, synthetic construct
  misc_feature 1..80: note = Artificially Synthesized Probe
  source 1..80: mol_type = other DNA
ataattgtaaatcattgcttcataacgtgtcagagaatgtctgtactaggcaattaaatggcagaatataatagaccaaa

SEQ ID NO: 139965 - DNA, 80 bp, synthetic construct; identical to SEQ ID NO: 43333
  misc_feature 1..80: note = Artificially Synthesized Probe
  source 1..80: mol_type = other DNA

SEQ ID NO: 139966 - DNA, 80 bp, synthetic construct
  misc_feature 1..80: note = Artificially Synthesized Probe
  source 1..80: mol_type = other DNA
gcatttttagctgaacaattagttacacccatcatatctacagatatatccaaataaaataagtatttggtttagctggt

SEQ ID NO: 139967 - DNA, 80 bp, synthetic construct
  misc_feature 1..80: note = Artificially Synthesized Probe
  source 1..80: mol_type = other DNA
tccatataatattttaatattttttgttgaatatttttgtctttagcttgaaattttaaaaatgctatgtgatgattgct

SEQ ID NO: 139968 - DNA, 80 bp, synthetic construct
  misc_feature 1..80: note = Artificially Synthesized Probe
  source 1..80: mol_type = other DNA
tactattcacatataaaacttgttttctcagatatcatcctcgtgtattttccagtgaactgtttggtgaagccgggaga

SEQ ID NO: 139969 - DNA, 80 bp, synthetic construct; identical to SEQ ID NO: 43334
  misc_feature 1..80: note = Artificially Synthesized Probe
  source 1..80: mol_type = other DNA

SEQ ID NO: 139970 - DNA, 80 bp, synthetic construct; identical to SEQ ID NO: 43286
  misc_feature 1..80: note = Artificially Synthesized Probe
  source 1..80: mol_type = other DNA

SEQ ID NO: 139971 - DNA, 80 bp, synthetic construct
  misc_feature 1..80: note = Artificially Synthesized Probe
  source 1..80: mol_type = other DNA
cactttgggaggctgaggtgggagaatcgcttgagcccaggaatttgagatcagcctgagcaacatagggagaccctgtc

SEQ ID NO: 139972 - DNA, 80 bp, synthetic construct
  misc_feature 1..80: note = Artificially Synthesized Probe
  source 1..80: mol_type = other DNA
ccccgtctctaaaaaaaaaatcttcttgtagagtctcaggattctgtaaccttcctgatccccacagtagaatattaggt

SEQ ID NO: 139973 - DNA, 80 bp, synthetic construct
  misc_feature 1..80: note = Artificially Synthesized Probe
  source 1..80: mol_type = other DNA
acaagagctggatgagaaggaggtatgagaaatgcagatagaagggaggcataactgctgatttattatttgtttatgat

SEQ ID NO: 139974 - DNA, 80 bp, synthetic construct
  misc_feature 1..80: note = Artificially Synthesized Probe
  source 1..80: mol_type = other DNA
aaatcttttctcacaggagggttatctttgagttgggtcttaaaggatgaggggccattcacaaggcacatttggacgtt

SEQ ID NO: 139975 - DNA, 80 bp, synthetic construct; identical to SEQ ID NO: 43335
  misc_feature 1..80: note = Artificially Synthesized Probe
  source 1..80: mol_type = other DNA

SEQ ID NO: 139976 - DNA, 80 bp, synthetic construct
  misc_feature 1..80: note = Artificially Synthesized Probe
  source 1..80: mol_type = other DNA
gggcagtcaagacttctggaggctggattgtgaagccaggtggacagttccagggacaattgggtgaggtgggcaggggt

SEQ ID NO: 139977 - DNA, 80 bp, synthetic construct
  misc_feature 1..80: note = Artificially Synthesized Probe
  source 1..80: mol_type = other DNA
cagaatcaaggggcatgggaattggtcagggagaattattttaagagaatttcactatttataattttaattaaaggtgc

SEQ ID NO: 139978 - DNA, 80 bp, synthetic construct; identical to SEQ ID NO: 43336
  misc_feature 1..80: note = Artificially Synthesized Probe
  source 1..80: mol_type = other DNA

SEQ ID NO: 139979 - DNA, 80 bp, synthetic construct
  misc_feature 1..80: note = Artificially Synthesized Probe
  source 1..80: mol_type = other DNA
tataccaaagtctgttgtctaagtagcaaagtactgagaaatagcagtttcaagcactgtagaatatgctactatctaga

SEQ ID NO: 139980 - DNA, 80 bp, synthetic construct
  misc_feature 1..80: note = Artificially Synthesized Probe
  source 1..80: mol_type = other DNA
gtcaccattacatgtgttaatggggtactggaaaattcttataaaatctggctaaatgtaagatggtctctagtctattt

SEQ ID NO: 139981 - DNA, 80 bp, synthetic construct
  misc_feature 1..80: note = Artificially Synthesized Probe
  source 1..80: mol_type = other DNA
agtgtagcatttggaagcaggggccaaactgcgaagggtcttgaaggctgaggtaatacttgaagagtttattgtaaggg

SEQ ID NO: 139982 - DNA, 80 bp, synthetic construct
  misc_feature 1..80: note = Artificially Synthesized Probe
  source 1..80: mol_type = other DNA
attggaatgtgtttaaatattaaagacattttagtattcaccactaaaatttattttaaaaatagggttttagaacttac

SEQ ID NO: 139983 - DNA, 80 bp, synthetic construct
  misc_feature 1..80: note = Artificially Synthesized Probe
  source 1..80: mol_type = other DNA
gctcttaaacttttcagtctcactatttttagctaccattctttttaacaagggaaataatggacacaggtttaagcagc

SEQ ID NO: 139984 - DNA, 80 bp, synthetic construct
  misc_feature 1..80: note = Artificially Synthesized Probe
  source 1..80: mol_type = other DNA
cctgcaccgaaatcgggccgttctcgcgtgcccgggttgctctcaagtggaaaacagatgctcccctagctgcacagctg

SEQ ID NO: 139985 - DNA, 80 bp, synthetic construct; identical to SEQ ID NO: 43337
  misc_feature 1..80: note = Artificially Synthesized Probe
  source 1..80: mol_type = other DNA

SEQ ID NO: 139986 - DNA, 80 bp, synthetic construct
  misc_feature 1..80: note = Artificially Synthesized Probe
  source 1..80: mol_type = other DNA
tcttagttcttagctgaaaagttccttttcagctagtatctgatggactatatggtctctgtgcatggtatcgtttacaa

SEQ ID NO: 139987 - DNA, 80 bp, synthetic construct
  misc_feature 1..80: note = Artificially Synthesized Probe
  source 1..80: mol_type = other DNA
ttctgcatccacagacaagttaggttgatgactgctgtgttggtgtagttcagcagacatcctgttagtcactctttcta

SEQ ID NO: 139988 - DNA, 80 bp, synthetic construct; identical to SEQ ID NO: 43338
  misc_feature 1..80: note = Artificially Synthesized Probe
  source 1..80: mol_type = other DNA

SEQ ID NO: 139989 - DNA, 80 bp, synthetic construct
  misc_feature 1..80: note = Artificially Synthesized Probe
  source 1..80: mol_type = other DNA
atatataaatataatatttccccccttagcttggtgggactgtagctcaagggtaaagatagaaattttggtgtttatgt

SEQ ID NO: 139990 - DNA, 80 bp, synthetic construct
  misc_feature 1..80: note = Artificially Synthesized Probe
  source 1..80: mol_type = other DNA
agcacattaaaaataccctgtttggaaaatgacagttttaaaaatagacaaaattatatgttagttatgaagagcgatgg

SEQ ID NO: 139991 - DNA, 80 bp, synthetic construct
  misc_feature 1..80: note = Artificially Synthesized Probe
  source 1..80: mol_type = other DNA
ttgttaaaagctgaagaaaaagaaaccagcatttaatttcagcccggttttgaagaagaggccgataatttgcctgtaga

SEQ ID NO: 139992 - DNA, 80 bp, synthetic construct
  misc_feature 1..80: note = Artificially Synthesized Probe
  source 1..80: mol_type = other DNA
aatcttgctttaatttggaagaaggtttagggagacttctcagaggaaaggaagtcccccctgcccttcagttatttatt

SEQ ID NO: 139993 - DNA, 80 bp, synthetic construct; identical to SEQ ID NO: 43339
  misc_feature 1..80: note = Artificially Synthesized Probe
  source 1..80: mol_type = other DNA

SEQ ID NO: 139994 - DNA, 80 bp, synthetic construct
  misc_feature 1..80: note = Artificially Synthesized Probe
  source 1..80: mol_type = other DNA
gagtgaacttgctctaacaaatagggacatcacattattttgaaaactctgctggagtagttagtcgttggattgttaaa

SEQ ID NO: 139995 - DNA, 80 bp, synthetic construct
  misc_feature 1..80: note = Artificially Synthesized Probe
  source 1..80: mol_type = other DNA
gatgacttcatggaaagtttgctcaagaatttgatatcatcaagtagagcagcttttccattcaagtacagtatagtccc

SEQ ID NO: 139996 - DNA, 80 bp, synthetic construct
  misc_feature 1..80: note = Artificially Synthesized Probe
  source 1..80: mol_type = other DNA
atctaaaacacatttgattgttggaagacagcagtatgattatatttctagaaataaagggttttaatacttgctagggt

SEQ ID NO: 139997 - DNA, 80 bp, synthetic construct; identical to SEQ ID NO: 43340
  misc_feature 1..80: note = Artificially Synthesized Probe
  source 1..80: mol_type = other DNA

SEQ ID NO: 139998 - DNA, 80 bp, synthetic construct
  misc_feature 1..80: note = Artificially Synthesized Probe
  source 1..80: mol_type = other DNA
agtttcatattacaacttcccgaggtgcttcctcccttggtctgaaaaatcaaaacaaagaactattggcaaaactttcc

SEQ ID NO: 139999 - DNA, 80 bp, synthetic construct
  misc_feature 1..80: note = Artificially Synthesized Probe
  source 1..80: mol_type = other DNA
taagctatgactggacatgttccataaaaacaagggaggttattagcaaagcttgctagatgtggattggttgaaaaacg

SEQ ID NO: 140000 - DNA, 80 bp, synthetic construct
  misc_feature 1..80: note = Artificially Synthesized Probe
  source 1..80: mol_type = other DNA
accaaattaagcctatcaagatagccatagatgtctgtggtaaggaaattgatgtcattgcagttctcttggatatatgg

SEQ ID NO: 140001 - DNA, 80 bp, synthetic construct; identical to SEQ ID NO: 43341
  misc_feature 1..80: note = Artificially Synthesized Probe
  source 1..80: mol_type = other DNA

SEQ ID NO: 140002 - DNA, 80 bp, synthetic construct
  misc_feature 1..80: note = Artificially Synthesized Probe
  source 1..80: mol_type = other DNA
agtatagggacaatgggtttttagcaattaaatgctaaatatatttaacatgtatcgatatgcttatatttattgaatct

SEQ ID NO: 140003 - DNA, 80 bp, synthetic construct
  misc_feature 1..80: note = Artificially Synthesized Probe
  source 1..80: mol_type = other DNA
ccttatgataacttattgaaatgatgtatgctatttgaaataaaatgatgattttagctattttttagaaaaaaatgaat

SEQ ID NO: 140004 - DNA, 80 bp, synthetic construct; identical to SEQ ID NO: 43287
  misc_feature 1..80: note = Artificially Synthesized Probe
  source 1..80: mol_type = other DNA

SEQ ID NO: 140005 - DNA, 80 bp, synthetic construct
  misc_feature 1..80: note = Artificially Synthesized Probe
  source 1..80: mol_type = other DNA
ataacagacatgaaatcgttgcattgacaatcgtaggtcttgataattcaaggaataattctgctgctgatcatttctac

SEQ ID NO: 140006 - DNA, 80 bp, synthetic construct; identical to SEQ ID NO: 43342
  misc_feature 1..80: note = Artificially Synthesized Probe
  source 1..80: mol_type = other DNA

SEQ ID NO: 140007 - DNA, 80 bp, synthetic construct
  misc_feature 1..80: note = Artificially Synthesized Probe
  source 1..80: mol_type = other DNA
aatttggtaactaaaggaactcacttgccagctaatttaacttaaaacttttagtaatttttgaatttgtgtagctacat

SEQ ID NO: 140008 - DNA, 80 bp, synthetic construct
  misc_feature 1..80: note = Artificially Synthesized Probe
  source 1..80: mol_type = other DNA
taaatttatcttatatgtaagattgttcatttttctggtctgctatattaagcacaaagaatactggtttcttagaaaca

SEQ ID NO: 140009 - DNA, 80 bp, synthetic construct
  misc_feature 1..80: note = Artificially Synthesized Probe
  source 1..80: mol_type = other DNA
tcatctaatgttattttttaaagaacgtattttaaaaatgactaaaaagtggtattttactttttcctctttgatcaatg

SEQ ID NO: 140010 - DNA, 80 bp, synthetic construct
  misc_feature 1..80: note = Artificially Synthesized Probe
  source 1..80: mol_type = other DNA
cattttattttagcctttaagttgaaacactgtgagtcattaacacttgtgttggctaagtttcatggcttctactaagc

SEQ ID NO: 140011 - DNA, 80 bp, synthetic construct; identical to SEQ ID NO: 43343
  misc_feature 1..80: note = Artificially Synthesized Probe
  source 1..80: mol_type = other DNA

SEQ ID NO: 140012 - DNA, 80 bp, synthetic construct
  misc_feature 1..80: note = Artificially Synthesized Probe
  source 1..80: mol_type = other DNA
gtgggttttgcatgcaacaaaaaattggaaaggggctaaacattttcccctctcctcagactactatgtaatttgtctat

SEQ ID NO: 140013 - DNA, 80 bp, synthetic construct
  misc_feature 1..80: note = Artificially Synthesized Probe
  source 1..80: mol_type = other DNA
ggtacaatcagtcggttcaaggtttagcttgttttattttacaaatgaaaacgtcggttttgtgtgatacgatgagactg

SEQ ID NO: 140014 - DNA, 80 bp, synthetic construct
  misc_feature 1..80: note = Artificially Synthesized Probe
  source 1..80: mol_type = other DNA
atttcttgaagacaaatgaattacttttgtattttttattgctgcttctgtatacatttatcattataatagaggcagat

SEQ ID NO: 140015 - DNA, 80 bp, synthetic construct; identical to SEQ ID NO: 43344
  misc_feature 1..80: note = Artificially Synthesized Probe
  source 1..80: mol_type = other DNA

SEQ ID NO: 140016 - DNA, 80 bp, synthetic construct
  misc_feature 1..80: note = Artificially Synthesized Probe
  source 1..80: mol_type = other DNA
ttttgttttaacattcaagcactggagagaataagttctccctgatttcaggcacttttccataggtaaccactgttaag

SEQ ID NO: 140017 - DNA, 80 bp, synthetic construct
  misc_feature 1..80: note = Artificially Synthesized Probe
  source 1..80: mol_type = other DNA
atcaaggagcacagattttaataatgcaaacaatattagtcctgtcccctctggcgtcacgaacctggacatactgattg

SEQ ID NO: 140018 - DNA, 80 bp, synthetic construct
  misc_feature 1..80: note = Artificially Synthesized Probe
  source 1..80: mol_type = other DNA
gagatctacagtaatgagtccctgtagcacctgatgaaccacagaaagggaagcagagaattaggatcaaatgtagctga

SEQ ID NO: 140019 - DNA, 80 bp, synthetic construct
  misc_feature 1..80: note = Artificially Synthesized Probe
  source 1..80: mol_type = other DNA
cattgttgttatcctgtattgcttattactgtgcttaatactgtgttgtattgcttattactgtgatatacttcctttga

SEQ ID NO: 140020 - DNA, 80 bp, synthetic construct; identical to SEQ ID NO: 43345
  misc_feature 1..80: note = Artificially Synthesized Probe
  source 1..80: mol_type = other DNA

SEQ ID NO: 140021 - DNA, 80 bp, synthetic construct
  misc_feature 1..80: note = Artificially Synthesized Probe
  source 1..80: mol_type = other DNA
atatttgtgtcattttctgtttgtccagaaaatgcattattgtgtagggaaaaaaagagagagtgaaaagggaaactgct

SEQ ID NO: 140022 - DNA, 80 bp, synthetic construct
  misc_feature 1..80: note = Artificially Synthesized Probe
  source 1..80: mol_type = other DNA
tatgctcaactatacagatgagagctgagagagaactaactggctgtaaagtgttcacctccacgttggttcctggcttt

SEQ ID NO: 140023 - DNA, 80 bp, synthetic construct; identical to SEQ ID NO: 43346
  misc_feature 1..80: note = Artificially Synthesized Probe
  source 1..80: mol_type = other DNA

SEQ ID NO: 140024 - DNA, 80 bp, synthetic construct
  misc_feature 1..80: note = Artificially Synthesized Probe
  source 1..80: mol_type = other DNA
actgaaaatattattgctatcttacatccttctccaattgaacatcactacaatagaagcagcagttgtctttatttatt

SEQ ID NO: 140025 - DNA, 80 bp, synthetic construct
  misc_feature 1..80: note = Artificially Synthesized Probe
  source 1..80: mol_type = other DNA
tgcccagctaatttttgtatttttagtagagacagggtttcaccatgttggccaggctggtcttgaactcctgacctcgt

SEQ ID NO: 140026 - DNA, 80 bp, synthetic construct
  misc_feature 1..80: note = Artificially Synthesized Probe
  source 1..80: mol_type = other DNA
aaagaactcttagagggagtgtgactacctagatgaatactgggttgggtttaaaataaagaaaaactgtgatgtgtaaa

SEQ ID NO: 140027 - DNA, 80 bp, synthetic construct
  misc_feature 1..80: note = Artificially Synthesized Probe
  source 1..80: mol_type = other DNA
tgccataaagaacaaaggaaaaaggagtaagtttgtgggggaagttgatgagtgcatgtaacatccaaatggacttaggg

SEQ ID NO: 140028 - DNA, 80 bp, synthetic construct
  misc_feature 1..80: note = Artificially Synthesized Probe
  source 1..80: mol_type = other DNA
acttgggttgatgttacgtgattttttgcttggagtgttctcataaaaccaagtagacatttattcaactatgatagtca

SEQ ID NO: 140029 - DNA, 80 bp, synthetic construct; identical to SEQ ID NO: 43347
  misc_feature 1..80: note = Artificially Synthesized Probe
  source 1..80: mol_type = other DNA

SEQ ID NO: 140030 - DNA, 80 bp, synthetic construct
  misc_feature 1..80: note = Artificially Synthesized Probe
  source 1..80: mol_type = other DNA
tttgtgtttgatgagataaatccatttcattttaattaaaaatgcttaacctatgtagagctggttgaacaccatgtagg

SEQ ID NO: 140031 - DNA, 80 bp, synthetic construct
  misc_feature 1..80: note = Artificially Synthesized Probe
  source 1..80: mol_type = other DNA
atattctaagaagtttgtttatataattgaatggtagaatcatcttaaaattaccctgacaatggttactggagctatgg

SEQ ID NO: 140032 - DNA, 80 bp, synthetic construct
  misc_feature 1..80: note = Artificially Synthesized Probe
  source 1..80: mol_type = other DNA
aggttttgcattttgaacagaaatgttatgagctgtgattgaatttgtcgtgaaagtgtgtcagtattaataaaagtatt

SEQ ID NO: 140033 - DNA, 80 bp, synthetic construct; identical to SEQ ID NO: 43348
  misc_feature 1..80: note = Artificially Synthesized Probe
  source 1..80: mol_type = other DNA

SEQ ID NO: 140034 - DNA, 80 bp, synthetic construct
  misc_feature 1..80: note = Artificially Synthesized Probe
  source 1..80: mol_type = other DNA
tgttgcttaacaacctctaaggtagcagttagggctgtgggtaaacatagattttttttattcatcattggtcaagttgc

SEQ ID NO: 140035 - DNA, 80 bp, synthetic construct
  misc_feature 1..80: note = Artificially Synthesized Probe
  source 1..80: mol_type = other DNA
ttttgcctcacgtcctgtcatgtcgtaatgtgataaactaaactgactccaagtaatatctagtgaccttatagtaatta

SEQ ID NO: 140036 - DNA, 80 bp, synthetic construct
  misc_feature 1..80: note = Artificially Synthesized Probe
  source 1..80: mol_type = other DNA
cacagcatataagtttgcatgtgttcttttagaaatagcaagcaatgactcctaaaatgttattaggggagattatagac

SEQ ID NO: 140037 - DNA, 80 bp, synthetic construct; identical to SEQ ID NO: 43349
  misc_feature 1..80: note = Artificially Synthesized Probe
  source 1..80: mol_type = other DNA

SEQ ID NO: 140038 - DNA, 80 bp, synthetic construct
  misc_feature 1..80: note = Artificially Synthesized Probe
  source 1..80: mol_type = other DNA
gtagctcctttgcttcttgggattcagggaattccatgaagttctttagatgggtccttgcctagtttttctccttgtta

SEQ ID NO: 140039 - DNA, 80 bp, synthetic construct
  misc_feature 1..80: note = Artificially Synthesized Probe
  source 1..80: mol_type = other DNA
tacaacagggttacactgttaggttaaatacaggcagcattccttttcaaaaaatcaatgtgctgtgtagcctgcaatag

SEQ ID NO: 140040 - DNA, 80 bp, synthetic construct
  misc_feature 1..80: note = Artificially Synthesized Probe
  source 1..80: mol_type = other DNA
taatatatttataagcattttatatatatgttatttctcttttatatttaatcacatacaaatcattaaaaaattcatta

SEQ ID NO: 140041 - DNA, 80 bp, synthetic construct
  misc_feature 1..80: note = Artificially Synthesized Probe
  source 1..80: mol_type = other DNA
ccttaattgaaaagttggagtaatttgaaaagatgagattattctatagtttctttgtcacctgcctccattttaaataa

SEQ ID NO: 140042 - DNA, 80 bp, synthetic construct; identical to SEQ ID NO: 43350
  misc_feature 1..80: note = Artificially Synthesized Probe
  source 1..80: mol_type = other DNA

SEQ ID NO: 140043 - DNA, 80 bp, synthetic construct
  misc_feature 1..80: note = Artificially Synthesized Probe
  source 1..80: mol_type = other DNA
ggtatatttatttttcctggaccctattcattcactgattctgtgaaaccttttctgtttgctgcatgcttctcacatac

SEQ ID NO: 140044 - DNA, 80 bp, synthetic construct
  misc_feature 1..80: note = Artificially Synthesized Probe
  source 1..80: mol_type = other DNA
tccctctgttatcattatactatcacttacattcatgaaatctttatataaaatggatgttggagtgcaagagccgattg

SEQ ID NO: 140045 - DNA, 80 bp, synthetic construct
  misc_feature 1..80: note = Artificially Synthesized Probe
  source 1..80: mol_type = other DNA
tttactctttcagaaaaacactcttgtaataggaacaaaattatccaaataatagtgtaaaccaagccaggcatagcagc

SEQ ID NO: 140046 - DNA, 80 bp, synthetic construct; identical to SEQ ID NO: 43351
  misc_feature 1..80: note = Artificially Synthesized Probe
  source 1..80: mol_type = other DNA

SEQ ID NO: 140047 - DNA, 80 bp, synthetic construct
  misc_feature 1..80: note = Artificially Synthesized Probe
  source 1..80: mol_type = other DNA
gaaggcagacggaagctctgcatatatagatattgagatacacaaggtggaagcttgtgtttggggagagcattttttgt

SEQ ID NO: 140048 - DNA, 80 bp, synthetic construct
  misc_feature 1..80: note = Artificially Synthesized Probe
  source 1..80: mol_type = other DNA
ttcccagacctccataggccacacttgaacagtctgtgaagaaggggaagaacaagagccacagcttgccagcccaaagt

SEQ ID NO: 140049 - DNA, 80 bp, synthetic construct
  misc_feature 1..80: note = Artificially Synthesized Probe
  source 1..80: mol_type = other DNA
ccccgggtagctcttatttatgtgtaccacatctaaaaccaaataacacttctgtattgaaagttacctacagtagtggt

SEQ ID NO: 140050 - DNA, 80 bp, synthetic construct
  misc_feature 1..80: note = Artificially Synthesized Probe
  source 1..80: mol_type = other DNA
aaagagtaaatgtaaggtcctatatttcaactcagaacatcaattaagaatagaacgcaggtcccggctcgacaccacat

SEQ ID NO: 140051 - DNA, 80 bp, synthetic construct; identical to SEQ ID NO: 43352
  misc_feature 1..80: note = Artificially Synthesized Probe
  source 1..80: mol_type = other DNA

SEQ ID NO: 140052 - DNA, 80 bp, synthetic construct
  misc_feature 1..80: note = Artificially Synthesized Probe
  source 1..80: mol_type = other DNA
ttgaaccataagatgctgtgccacaaactataactggaaatgtttgtgcagaggccagattagaagctgttagcaagaag

SEQ ID NO: 140053 - DNA, 80 bp, synthetic construct
  misc_feature 1..80: note = Artificially Synthesized Probe
  source 1..80: mol_type = other DNA
ccagtgaataccatttaaccaacgacagctatcaccacagtctcttaaaagaaaggacattttttggctgggcgtggtgg

SEQ ID NO: 140054 - DNA, 80 bp, synthetic construct
  misc_feature 1..80: note = Artificially Synthesized Probe
  source 1..80: mol_type = other DNA
cgtggtggcaggtgcctgtagtcccagctactagggaggctgaggaaggggaatcacttgaaccagggaggcggaggttg

SEQ ID NO: 140055 - DNA, 80 bp, synthetic construct; identical to SEQ ID NO: 43353
  misc_feature 1..80: note = Artificially Synthesized Probe
  source 1..80: mol_type = other DNA

SEQ ID NO: 140056 - DNA, 80 bp, synthetic construct
  misc_feature 1..80: note = Artificially Synthesized Probe
  source 1..80: mol_type = other DNA
ggaatagacaagatcatgccctgttcacagaaaggagcctggttgattgagtgcaaaatttcaattttggtgtagaaaga

SEQ ID NO: 140057 - DNA, 80 bp, synthetic construct
  misc_feature 1..80: note = Artificially Synthesized Probe
  source 1..80: mol_type = other DNA
tatttcaccaggtttcacctctgctttctcctccgcaataaggagattgttcaaggagtaaatcataaaaggatttgaat

SEQ ID NO: 140058 - DNA, 80 bp, synthetic construct; identical to SEQ ID NO: 43354
  misc_feature 1..80: note = Artificially Synthesized Probe
  source 1..80: mol_type = other DNA

SEQ ID NO: 140059 - DNA, 80 bp, synthetic construct
  misc_feature 1..80: note = Artificially Synthesized Probe
  source 1..80: mol_type = other DNA
tactttggattacagttcattgaccagagctgagtacaagttacagtggtgatgagaaatacgtgttttggctggtcaca

SEQ ID NO: 140060 - DNA, 80 bp, synthetic construct; identical to SEQ ID NO: 43288
  misc_feature 1..80: note = Artificially Synthesized Probe
  source 1..80: mol_type = other DNA

SEQ ID NO: 140061 - DNA, 80 bp, synthetic construct
  misc_feature 1..80: note = Artificially Synthesized Probe
  source 1..80: mol_type = other DNA
taagcaaaccgtgtactgcttagagaaaaataaactgacacctgtgtacccacagtgcacttcaggaagtgcgccgttct

SEQ ID NO: 140062 - DNA, 80 bp, synthetic construct
  misc_feature 1..80: note = Artificially Synthesized Probe
  source 1..80: mol_type = other DNA
aatctgagtagcaagcacatacataatgtttaaagagagggcaacgttgccaccgttaaatgaaggctcccaggaggaag

SEQ ID NO: 140063 - DNA, 80 bp, synthetic construct
  misc_feature 1..80: note = Artificially Synthesized Probe
  source 1..80: mol_type = other DNA
agggtgagggcgctctgtgtgccctgtgtgccccgttttcagactcgccattggctaccatcagcttgcagattaggtag

SEQ ID NO: 140064 - DNA, 80 bp, synthetic construct; identical to SEQ ID NO: 43355
  misc_feature 1..80: note = Artificially Synthesized Probe
  source 1..80: mol_type = other DNA

SEQ ID NO: 140065 - DNA, 80 bp, synthetic construct
  misc_feature 1..80: note = Artificially Synthesized Probe
  source 1..80: mol_type = other DNA
caccttgagactgagtatgtctggaaatgccttcattctcccttcctagtgggttgataatttggtggtgtgttaattag

SEQ ID NO: 140066 - DNA, 80 bp, synthetic construct
  misc_feature 1..80: note = Artificially Synthesized Probe
  source 1..80: mol_type = other DNA
taaagatgctaaattgtatgttggaaccctgtttcccaacacactgagctgtgtagaggtcctgtttttggtcacagaat

SEQ ID NO: 140067 - DNA, 80 bp, synthetic construct
  misc_feature 1..80: note = Artificially Synthesized Probe
  source 1..80: mol_type = other DNA
gtctttcctactttctctactttgtccatcacatcttgtcacttgatgatctgttggtgcctcacaagttcaaatgtctt

SEQ ID NO: 140068 - DNA, 80 bp, synthetic construct; identical to SEQ ID NO: 43356
  misc_feature 1..80: note = Artificially Synthesized Probe
  source 1..80: mol_type = other DNA

SEQ ID NO: 140069 - DNA, 80 bp, synthetic construct
  misc_feature 1..80: note = Artificially Synthesized Probe
  source 1..80: mol_type = other DNA
ctgttgcttttactgagcatttctgatgtcaggttgcgtactcgtctcttatatgtgttactgcacttaatcctcacagc

SEQ ID NO: 140070 - DNA, 80 bp, synthetic construct
  misc_feature 1..80: note = Artificially Synthesized Probe
  source 1..80: mol_type = other DNA
tgtggtcaaacccttttatgaactgtggtaataggccaggtacatgggacatgcaggcttccatatagttacaaagggta

SEQ ID NO: 140071 - DNA, 80 bp, synthetic construct
  misc_feature 1..80: note = Artificially Synthesized Probe
  source 1..80: mol_type = other DNA
atggtgtccccatcagatatttatagttcatgcatagttcatcaaagtctggatgcagtttaccagttgggccattctta

SEQ ID NO: 140072 - DNA, 80 bp, synthetic construct; identical to SEQ ID NO: 43357
  misc_feature 1..80: note = Artificially Synthesized Probe
  source 1..80: mol_type = other DNA

SEQ ID NO: 140073 - DNA, 80 bp, synthetic construct
  misc_feature 1..80: note = Artificially Synthesized Probe
  source 1..80: mol_type = other DNA
aaactttgtttcgtgcccaaatttactttgcataatgtgtgaagttggcttcaggctatgtgtataggtatttgtgaaac

SEQ ID NO: 140074 - DNA, 80 bp, synthetic construct
  misc_feature 1..80: note = Artificially Synthesized Probe
  source 1..80: mol_type = other DNA
cctaatgaattgttctgttcatcacagttacgtctccacagcctttaaagtttgcgtgtataacccagtgttcagagtgt

SEQ ID NO: 140075 - DNA, 80 bp, synthetic construct
  misc_feature 1..80: note = Artificially Synthesized Probe
  source 1..80: mol_type = other DNA
acattttaagcacctagcacttattatagacttagaatggatgagatttacagttgaagtagacagtgtcatgcatgaat

SEQ ID NO: 140076 - DNA, 80 bp, synthetic construct; identical to SEQ ID NO: 43358
  misc_feature 1..80: note = Artificially Synthesized Probe
  source 1..80: mol_type = other DNA

SEQ ID NO: 140077 - DNA, 80 bp, synthetic construct
  misc_feature 1..80: note = Artificially Synthesized Probe
  source 1..80: mol_type = other DNA
tcctcatccacagttctcactgacctctaagctccaggaaggcagatctcacctctaagccttcacatcctttgctgtca

SEQ ID NO: 140078 - DNA, 80 bp, synthetic construct
  misc_feature 1..80: note = Artificially Synthesized Probe
  source 1..80: mol_type = other DNA
tcctgctttcctctgcctccttcctttcttcctcagtggtcctatggatccactaccagcggtggtgggaaggtactccc

SEQ ID NO: 140079 - DNA, 80 bp, synthetic construct
  misc_feature 1..80: note = Artificially Synthesized Probe
  source 1..80: mol_type = other DNA
tcatatgcctggtacttagtaactacttggaagttagttattgaccaggggttggacaatggtgcctcagtgtttctgtg

SEQ ID NO: 140080 - DNA, 80 bp, synthetic construct
  misc_feature 1..80: note = Artificially Synthesized Probe
  source 1..80: mol_type = other DNA
cctctcaggttagcctggttagagtagaattttcagaacgctccttgtggggaaaaaaagaagtaaagttgttacaaaaa

SEQ ID NO: 140081 - DNA, 80 bp, synthetic construct; identical to SEQ ID NO: 43359
  misc_feature 1..80: note = Artificially Synthesized Probe
  source 1..80: mol_type = other DNA

SEQ ID NO: 140082 - DNA, 80 bp, synthetic construct
  misc_feature 1..80: note = Artificially Synthesized Probe
  source 1..80: mol_type = other DNA
ttccaacacaaagattctaggattctgtgtttttataacccccagttaagaccaggatgctcttggacttagattaacat

SEQ ID NO: 140083 - DNA, 80 bp, synthetic construct
  misc_feature 1..80: note = Artificially Synthesized Probe
  source 1..80: mol_type = other DNA
atggagtgcattctcttgatatttggggtctgccttcccggggccatttctagggtaagagacattccggcggtgacttc

SEQ ID NO: 140084 - DNA, 80 bp, synthetic construct
  misc_feature 1..80: note = Artificially Synthesized Probe
  source 1..80: mol_type = other DNA
tcccatctccagcactcattaggataggcttgggatgaatctgcatggatgatatgattcgaataagcaactgcttgaaa

SEQ ID NO: 140085 - DNA, 80 bp, synthetic construct
  misc_feature 1..80: note = Artificially Synthesized Probe
  source 1..80: mol_type = other DNA
atttaattatggtaaaagatgcataacataaaatttatcatctttaccatgttttatttttgagacagaatctgtgtgtg

SEQ ID NO: 140086 - DNA, 80 bp, synthetic construct; identical to SEQ ID NO: 43360
  misc_feature 1..80: note = Artificially Synthesized Probe
  source 1..80: mol_type = other DNA

SEQ ID NO: 140087 - DNA, 80 bp, synthetic construct
  misc_feature 1..80: note = Artificially Synthesized Probe
  source 1..80: mol_type = other DNA
acagacactggcagtcactgttctctattttctttttccatacatttgtcaattctaggtgcctcatggaagtggagcca

SEQ ID NO: 140088 - DNA, 80 bp, synthetic construct
  misc_feature 1..80: note = Artificially Synthesized Probe
  source 1..80: mol_type = other DNA
ttatttttatatttttaacttttaggttacggggtacatgtgaaggtgtgttatatagttaaactcatgtcacgggggtt

SEQ ID NO: 140089 - DNA, 80 bp, synthetic construct
  misc_feature 1..80: note = Artificially Synthesized Probe
  source 1..80: mol_type = other DNA
agtgagaacatgcagcattgggttttctgttcctgctgcgttagtttgctaaggataatagcctccagctccatccatgt

SEQ ID NO: 140090 - DNA, 80 bp, synthetic construct; identical to SEQ ID NO: 43361
  misc_feature 1..80: note = Artificially Synthesized Probe
  source 1..80: mol_type = other DNA

SEQ ID NO: 140091 - DNA, 80 bp, synthetic construct
  misc_feature 1..80: note = Artificially Synthesized Probe
  source 1..80: mol_type = other DNA
ctagtgatgggattgctggggggtagtgctgattttagctctttgaggaattgccacactgctttccacaatggttgaac

SEQ ID NO: 140092 - DNA, 80 bp, synthetic construct
  misc_feature 1..80: note = Artificially Synthesized Probe
  source 1..80: mol_type = other DNA
tttttttaacatgcttgttggctgcatgtacgtcttctcttgaaatgtgtctgttcgttggagcactgtttgttcattgg

SEQ ID NO: 140093 - DNA, 80 bp, synthetic construct
  misc_feature 1..80: note = Artificially Synthesized Probe
  source 1..80: mol_type = other DNA
ttggagcactgtttgttcattggagcactgtttgtctgtttgttggagcactgtttttctgttcattggagcactgttta

SEQ ID NO: 140094 - DNA, 80 bp, synthetic construct; identical to SEQ ID NO: 43289
  misc_feature 1..80: note = Artificially Synthesized Probe
  source 1..80: mol_type = other DNA

SEQ ID NO: 140095 - DNA, 80 bp, synthetic construct; identical to SEQ ID NO: 43362
  misc_feature 1..80: note = Artificially Synthesized Probe
  source 1..80: mol_type = other DNA

SEQ ID NO: 140096 - DNA, 80 bp, synthetic construct
  misc_feature 1..80: note = Artificially Synthesized Probe
  source 1..80: mol_type = other DNA
ggtgctgggtattacaatggctgctatctcttaaattatcccatttaaattatttcaggtatttgctttctgcattcaat

SEQ ID NO: 140097 - DNA, 80 bp, synthetic construct
  misc_feature 1..80: note = Artificially Synthesized Probe
  source 1..80: mol_type = other DNA
gtttcacgattttaacaccagtaggaatcaaggcgtcaacagagttggtttcttctggagctctagggctcagtccactt

SEQ ID NO: 140098 - DNA, 80 bp, synthetic construct; identical to SEQ ID NO: 43363
  misc_feature 1..80: note = Artificially Synthesized Probe
  source 1..80: mol_type = other DNA

SEQ ID NO: 140099 - DNA, 80 bp, synthetic construct
  misc_feature 1..80: note = Artificially Synthesized Probe
  source 1..80: mol_type = other DNA
agcttgtcagtaggtatttattaaagggttagctttagtagaaaaattctgtgttaaacatacacaagtgcacacacaca

SEQ ID NO: 140100 - DNA, 80 bp, synthetic construct
  misc_feature 1..80: note = Artificially Synthesized Probe
  source 1..80: mol_type = other DNA
cctctgacctaccatttaaagaagctattaatgtattctagaaaatatgtacctatagttttaaaggtataagcaatgct

SEQ ID NO: 140101 - DNA, 80 bp, synthetic construct
  misc_feature 1..80: note = Artificially Synthesized Probe
  source 1..80: mol_type = other DNA
gcaccgcggtggcagcgaagggtcctagccattcccgacttcagctcgctttgcgccactgcggggagacccgcggctgc

SEQ ID NO: 140102 - DNA, 80 bp, synthetic construct
  misc_feature 1..80: note = Artificially Synthesized Probe
  source 1..80: mol_type = other DNA
gtttatttctggaaaatctaaggcttttgtttttaacccttccatggttgctaccttcactccctcaccacttaatgtgt

SEQ ID NO: 140103 - DNA, 80 bp, synthetic construct; identical to SEQ ID NO: 43364
  misc_feature 1..80: note = Artificially Synthesized Probe
  source 1..80: mol_type = other DNA

SEQ ID NO: 140104 - DNA, 80 bp, synthetic construct
  misc_feature 1..80: note = Artificially Synthesized Probe
  source 1..80: mol_type = other DNA
cttcttcactacctctaccactatctctacctaacttgtaaatgttgaactaccccagggcttggctctgggatccatcc

SEQ ID NO: 140105 - DNA, 80 bp, synthetic construct
  misc_feature 1..80: note = Artificially Synthesized Probe
  source 1..80: mol_type = other DNA
aaaaaatcaaaaaatcataggaagtttgtttcctcatacatagcagttaaggttttctgtccagcacagcagttgttacc

SEQ ID NO: 140106 - DNA, 80 bp, synthetic construct
  misc_feature 1..80: note = Artificially Synthesized Probe
  source 1..80: mol_type = other DNA
ttaggtaatttctgatccataccccctcgctgggtagtgtccattaataacatggctttaaaaagtgtctctgtgactaa

SEQ ID NO: 140107 - DNA, 80 bp, synthetic construct
  misc_feature 1..80: note = Artificially Synthesized Probe
  source 1..80: mol_type = other DNA
atttcctgtcactctctactcactaactgctcactactctgttggccttatctgtcccttgaagttgccaagcatgtttc

SEQ ID NO: 140108 - DNA, 80 bp, synthetic construct
  misc_feature 1..80: note = Artificially Synthesized Probe
  source 1..80: mol_type = other DNA
ttccttctttattgtcagtctctcccacttgagtgtaagttccttaagagtaagaactttgtgcattttcctttctttag

SEQ ID NO: 140109 - DNA, 80 bp, synthetic construct; identical to SEQ ID NO: 43365
  misc_feature 1..80: note = Artificially Synthesized Probe
  source 1..80: mol_type = other DNA

SEQ ID NO: 140110 - DNA, 80 bp, synthetic construct
  misc_feature 1..80: note = Artificially Synthesized Probe
  source 1..80: mol_type = other DNA
atcttgaacacttgaatcccactcatttccctcccagtgactacaccattgttatcaagcatttaactctgtagaccttt

SEQ ID NO: 140111 - DNA, 80 bp, synthetic construct
  misc_feature 1..80: note = Artificially Synthesized Probe
  source 1..80: mol_type = other DNA
tctactacttctgaatcacttttcaacttacatttttttgatgcctgtgcttcctcttagaattttttttttttggagat

SEQ ID NO: 140112 - DNA, 80 bp, synthetic construct
  misc_feature 1..80: note = Artificially Synthesized Probe
  source 1..80: mol_type = other DNA
agagacagggtttcactgtgttgcccaggctggtctcaaactcctgagctcaggcaatccgcctgccttctccttccaaa

SEQ ID NO: 140113 - DNA, 80 bp, synthetic construct; identical to SEQ ID NO: 43366
  misc_feature 1..80: note = Artificially Synthesized Probe
  source 1..80: mol_type = other DNA

SEQ ID NO: 140114 - DNA, 80 bp, synthetic construct
  misc_feature 1..80: note = Artificially Synthesized Probe
  source 1..80: mol_type = other DNA
ttattatgaacccagtaagatataattgtgggacacacattggtatactagaaaggtacgtcattaactagccaaaccag

SEQ ID NO: 140115 - DNA, 80 bp, synthetic construct
  misc_feature 1..80: note = Artificially Synthesized Probe
  source 1..80: mol_type = other DNA
ttcactatgtctttggggtatttttccaagccactgacactcttgtgagggcttatagcgtaatctgaaagattatcagt

SEQ ID NO: 140116 - DNA, 80 bp, synthetic construct
  misc_feature 1..80: note = Artificially Synthesized Probe
  source 1..80: mol_type = other DNA
ctttttatcttggagattttggacccctgcagctgggactgttgttttttctggtaatattcatttacatttacccatgt

SEQ ID NO: 140117 - DNA, 80 bp, synthetic construct; identical to SEQ ID NO: 43367
  misc_feature 1..80: note = Artificially Synthesized Probe
  source 1..80: mol_type = other DNA

SEQ ID NO: 140118 - DNA, 80 bp, synthetic construct
  misc_feature 1..80: note = Artificially Synthesized Probe
  source 1..80: mol_type = other DNA
atgttccttgggtgatgagtttatctcatgttttatatttgtctgatagtattttctttttttttcccctcaacttcctt

SEQ ID NO: 140119 - DNA, 80 bp, synthetic construct
  misc_feature 1..80: note = Artificially Synthesized Probe
  source 1..80: mol_type = other DNA
ttttaaagtttgtttttgatagttccaatattgaagcccctttgggtccatttctattgcctgttgtttctcttgagttt

SEQ ID NO: 140120 - DNA, 80 bp, synthetic construct
  misc_feature 1..80: note = Artificially Synthesized Probe
  source 1..80: mol_type = other DNA
ggactacaggcacatgccaccatgcctggctaatttttgtatttttagtaaagatgggatttcactatgttggccatgct

SEQ ID NO: 140121 - DNA, 80 bp, synthetic construct; identical to SEQ ID NO: 43368
  misc_feature 1..80: note = Artificially Synthesized Probe
  source 1..80: mol_type = other DNA

SEQ ID NO: 140122 - DNA, 80 bp, synthetic construct
  misc_feature 1..80: note = Artificially Synthesized Probe
  source 1..80: mol_type = other DNA
ctgcaaccccattttctgcgcacctaggccctgatggctgttagaggtacccatcagcctgctggctgtcctctctgaag

SEQ ID NO: 140123 - DNA, 80 bp, synthetic construct
  misc_feature 1..80: note = Artificially Synthesized Probe
  source 1..80: mol_type = other DNA
tcctcagcacgagggttggtccaaattgcctcgtttgaaattaacagaagctcttgtgcaatttaaacttacacaaattc

SEQ ID NO: 140124 - DNA, 80 bp, synthetic construct
  misc_feature 1..80: note = Artificially Synthesized Probe
  source 1..80: mol_type = other DNA
tgacttcctaagcccgatgaaattacctgcagaataatatgtttctgtgaacttttggagaggaaagaggccatggtttc

SEQ ID NO: 140125 - DNA, 80 bp, synthetic construct
  misc_feature 1..80: note = Artificially Synthesized Probe
  source 1..80: mol_type = other DNA
gtttaggaatacttaaacaagtgctgttggtaagctatatagtaaaatgggcccaccgagagatgcagaggagaaaattt

SEQ ID NO: 140126 - DNA, 80 bp, synthetic construct
  misc_feature 1..80: note = Artificially Synthesized Probe
  source 1..80: mol_type = other DNA
tgtattagaaccaagggcacaggaaacgttaattctagttctagttttctgaaaaacgtaattgccatccagaaatgact

SEQ ID NO: 140127 - DNA, 80 bp, synthetic construct; identical to SEQ ID NO: 43369
  misc_feature 1..80: note = Artificially Synthesized Probe
  source 1..80: mol_type = other DNA

SEQ ID NO: 140128 - DNA, 80 bp, synthetic construct
  misc_feature 1..80: note = Artificially Synthesized Probe
  source 1..80: mol_type = other DNA
aaggcagtccattctgtttttcaattatttctgatagtttttcctcacacacagttgcttctttgcatctccccatcata

SEQ ID NO: 140129 - DNA, 80 bp, synthetic construct
  misc_feature 1..80: note = Artificially Synthesized Probe
  source 1..80: mol_type = other DNA
tatagattgtatgtttcagatcatcagtggttcttcatgtggcatggcacttgccctgttatgctttcatctcccttggg

SEQ ID NO: 140130 - DNA, 80 bp, synthetic construct; identical to SEQ ID NO: 43370
  misc_feature 1..80: note = Artificially Synthesized Probe
  source 1..80: mol_type = other DNA

SEQ ID NO: 140131 - DNA, 80 bp, synthetic construct
  misc_feature 1..80: note = Artificially Synthesized Probe
  source 1..80: mol_type = other DNA
ggcacacacttgtagtcgcagctactctggaggctgaggggagagaatcacttaatcccaggaggtagaggctgcagtga

SEQ ID NO: 140132 - DNA, 80 bp, synthetic construct
  misc_feature 1..80: note = Artificially Synthesized Probe
  source 1..80: mol_type = other DNA
gtggttatagaaagtgaaaagtgcttattgtatgcggtttattttctttgaccatcaaatacaactcccgcccctctgtt

SEQ ID NO: 140133 - DNA, 80 bp, synthetic construct
  misc_feature 1..80: note = Artificially Synthesized Probe
  source 1..80: mol_type = other DNA
ggtgaaaaacttctgggagatcatttttgtatttaatagctacatggtgatcttaaaaataaaatttggaaatctgctat

SEQ ID NO: 140134 - DNA, 80 bp, synthetic construct
  misc_feature 1..80: note = Artificially Synthesized Probe
  source 1..80: mol_type = other DNA
aggctgaacctgtatctcttagtgtttacctcatctccctggcctttctttttatttccagaactaataaaaaaaattca

SEQ ID NO: 140135 - DNA, 80 bp, synthetic construct
  misc_feature 1..80: note = Artificially Synthesized Probe
  source 1..80: mol_type = other DNA
gtacatattgacagtcagtagagcattgattatatctttagcactgtgcttggccccggaaataaaaatgtggagagaca

SEQ ID NO: 140136 - DNA, 80 bp, synthetic construct; identical to SEQ ID NO: 43371
  misc_feature 1..80: note = Artificially Synthesized Probe
  source 1..80: mol_type = other DNA

SEQ ID NO: 140137 - DNA, 80 bp, synthetic construct
  misc_feature 1..80: note = Artificially Synthesized Probe
  source 1..80: mol_type = other DNA
cacacacctggctaagttttaaatttttggtagagacaggacttcactgtgttgcccaggctagtctcaaacttctggcc

SEQ ID NO: 140138 - DNA, 80 bp, synthetic construct
  misc_feature 1..80: note = Artificially Synthesized Probe
  source 1..80: mol_type = other DNA
tagaccttagatttgtacgatgtctttacattgtaagctgtttcctgaggaaacatatgtatggcatatgctattattgg

SEQ ID NO: 140139 - DNA, 80 bp, synthetic construct
  misc_feature 1..80: note = Artificially Synthesized Probe
  source 1..80: mol_type = other DNA
taagaaaataatcatttaatggcattgttagtgctccagaatcataccactagctaaaatcacaaacattcaaaagggag

SEQ ID NO: 140140 - DNA, 80 bp, synthetic construct; identical to SEQ ID NO: 43372
  misc_feature 1..80: note = Artificially Synthesized Probe
  source 1..80: mol_type = other DNA

SEQ ID NO: 140141 - DNA, 80 bp, synthetic construct
  misc_feature 1..80: note = Artificially Synthesized Probe
  source 1..80: mol_type = other DNA
ggaacagttgaccctgttcttggcattgaaaattgtggtcagaaaatcaagggagtggtgagtcctctgtgggtttcaac

SEQ ID NO: 140142 - DNA, 80 bp, synthetic construct
  misc_feature 1..80: note = Artificially Synthesized Probe
  source 1..80: mol_type = other DNA
ctaggctagtttagttttctaaggtgtgtaagtagctgatacctggaagtgatcaaagcagtttgtcttttttgttttgg

SEQ ID NO: 140143 - DNA, 80 bp, synthetic construct
  misc_feature 1..80: note = Artificially Synthesized Probe
  source 1..80: mol_type = other DNA
aaaaaagacaaattcagtcttgtttctagtggcatttgttagaaaaatctctcatgggttggcttggtgcacttttatgc

SEQ ID NO: 140144 - DNA, 80 bp, synthetic construct; identical to SEQ ID NO: 43373
  misc_feature 1..80: note = Artificially Synthesized Probe
  source 1..80: mol_type = other DNA

SEQ ID NO: 140145 - DNA, 80 bp, synthetic construct; identical to SEQ ID NO: 43290
  misc_feature 1..80: note = Artificially Synthesized Probe
  source 1..80: mol_type = other DNA

SEQ ID NO: 140146 - DNA, 80 bp, synthetic construct
  misc_feature 1..80: note = Artificially Synthesized Probe
  source 1..80: mol_type = other DNA
aaaagtggatatggcagtcagagacttacgcttttgatttgggttattcttttatgtatattttttgcaattaataatat

SEQ ID NO: 140147 - DNA, 80 bp, synthetic construct
  misc_feature 1..80: note = Artificially Synthesized Probe
  source 1..80: mol_type = other DNA
ttcttctgtttttgctctgaagaacactttatgtctgaattttgagatgctatgcaatgctccttttttcttctctttca

SEQ ID NO: 140148 - DNA, 80 bp, synthetic construct; identical to SEQ ID NO: 43374
  misc_feature 1..80: note = Artificially Synthesized Probe
  source 1..80: mol_type = other DNA

SEQ ID NO: 140149 - DNA, 80 bp, synthetic construct
  misc_feature 1..80: note = Artificially Synthesized Probe
  source 1..80: mol_type = other DNA
tatttaatttatgcctttgacagctattttgctttgatatttttgtagtgaaaatcatagaactgtggttgttagtgcta

SEQ ID NO: 140150 - DNA, 80 bp, synthetic construct
  misc_feature 1..80: note = Artificially Synthesized Probe
  source 1..80: mol_type = other DNA
tctaaatttttcaaaaggaaaaagtaaggattttttttttccagggtaacagattatccccctaccccacaaggtattgg

SEQ ID NO: 140151 - DNA, 80 bp, synthetic construct
  misc_feature 1..80: note = Artificially Synthesized Probe
  source 1..80: mol_type = other DNA
aatacttacgaaatagtaaagtgctctggataaattttgtttcatagctactgtccggtattcccaaacgcaccgagtca

SEQ ID NO: 140152 - DNA, 80 bp, synthetic construct
  misc_feature 1..80: note = Artificially Synthesized Probe
  source 1..80: mol_type = other DNA
ttgaaaagcacctgacaattagaatggacttagtttaatcacagttcatggaaaactaaggagtaaactgactttacagg

SEQ ID NO: 140153 - DNA, 80 bp, synthetic construct; identical to SEQ ID NO: 43375
  misc_feature 1..80: note = Artificially Synthesized Probe
  source 1..80: mol_type = other DNA

SEQ ID NO: 140154 - DNA, 80 bp, synthetic construct
  misc_feature 1..80: note = Artificially Synthesized Probe
  source 1..80: mol_type = other DNA
tgttagcttttttcttttcttcacattatataattagtaatagaaaaactcaaagtcttaaggattatagaaggttgttt

SEQ ID NO: 140155 - DNA, 80 bp, synthetic construct
  misc_feature 1..80: note = Artificially Synthesized Probe
  source 1..80: mol_type = other DNA
taagtagacattgaaacacccacgtgaagagatgtggttatgtgttcatctgtactttcaaagtatattcagagcccagc

SEQ ID NO: 140156 - DNA, 80 bp, synthetic construct; identical to SEQ ID NO: 43376
  misc_feature 1..80: note = Artificially Synthesized Probe
  source 1..80: mol_type = other DNA

SEQ ID NO: 140157 - DNA, 80 bp, synthetic construct
  misc_feature 1..80: note = Artificially Synthesized Probe
  source 1..80: mol_type = other DNA
acagtcctgaactgtggtggagtttattatgtcggcacacctgaggagacatttgagtgtcagttttcttggaatttttg

SEQ ID NO: 140158 - DNA, 80 bp, synthetic construct
  misc_feature 1..80: note = Artificially Synthesized Probe
  source 1..80: mol_type = other DNA
tgtggcgcatgctctctccttagctcctttactctgttgatgctcaactgagtgctctccatccatgtggctaattcttc

SEQ ID NO: 140159 - DNA, 80 bp, synthetic construct
  misc_feature 1..80: note = Artificially Synthesized Probe
  source 1..80: mol_type = other DNA
ttttgttatttagctcttcttcgggcatagatctttgggttttgtttgtccactggtttcccaaggcaccttgaaaagtg

SEQ ID NO: 140160 - DNA, 80 bp, synthetic construct
  misc_feature 1..80: note = Artificially Synthesized Probe
  source 1..80: mol_type = other DNA
gttttcccagtgttctaacttgggttcccctttccctttaacatccctagactttctttctgggcaatataggtttagaa

SEQ ID NO: 140161 - DNA, 80 bp, synthetic construct; identical to SEQ ID NO: 43377
  misc_feature 1..80: note = Artificially Synthesized Probe
  source 1..80: mol_type = other DNA

SEQ ID NO: 140162 - DNA, 80 bp, synthetic construct
  misc_feature 1..80: note = Artificially Synthesized Probe
  source 1..80: mol_type = other DNA
ggtgactcttccttacttgtaaaggtaaaagttattaatgtgaaatgaaatcttgtgcacaagatggtgtcaacctttta

SEQ ID NO: 140163 - DNA, 80 bp, synthetic construct
  misc_feature 1..80: note = Artificially Synthesized Probe
  source 1..80: mol_type = other DNA
attttttctttaccttagaccttttaatgttgcagtttccaatgtctgttgtcaagaaaacaataatttatatatacact

SEQ ID NO: 140164 - DNA, 80 bp, synthetic construct
  misc_feature 1..80: note = Artificially Synthesized Probe
  source 1..80: mol_type = other DNA
aatgctggttctcatggaatttacaatctcttggggaatatgcacaataaacagaagaaaatactaaaatatggctggtg

SEQ ID NO: 140165 - DNA, 80 bp, synthetic construct
  misc_feature 1..80: note = Artificially Synthesized Probe
  source 1..80: mol_type = other DNA
gtcctcgagaggctgaggcaagaggatcacttgaacctagtatttcgaggatacagtgagctatgatcacattactgcac

SEQ ID NO: 140166 - DNA, 80 bp, synthetic construct; identical to SEQ ID NO: 43378
  misc_feature 1..80: note = Artificially Synthesized Probe
  source 1..80: mol_type = other DNA

SEQ ID NO: 140167 - DNA, 80 bp, synthetic construct
  misc_feature 1..80: note = Artificially Synthesized Probe
  source 1..80: mol_type = other DNA
agtgctaatggtcagcataactcaaactatttcagatttggaatttaacttgcactcatttattacaaagtcaatactca

SEQ ID NO: 140168 - DNA, 80 bp, synthetic construct
  misc_feature 1..80: note = Artificially Synthesized Probe
  source 1..80: mol_type = other DNA
aattttacttatttcactttgatgaaagagagaaacatctggtgaaatactaggggtggtcttttcactttcaggcctta

SEQ ID NO: 140169 - DNA, 80 bp, synthetic construct
  misc_feature 1..80: note = Artificially Synthesized Probe
  source 1..80: mol_type = other DNA
taatacttttgtagtaattatagaatgctttaaatatatattattctgaattaaaaagattaggctttaaaaaattaatt

SEQ ID NO: 140170 - DNA, 80 bp, synthetic construct; identical to SEQ ID NO: 43379
  misc_feature 1..80: note = Artificially Synthesized Probe
  source 1..80: mol_type = other DNA

SEQ ID NO: 140171 - DNA, 80 bp, synthetic construct
  misc_feature 1..80: note = Artificially Synthesized Probe
  source 1..80: mol_type = other DNA
cattggatataggagcctaacagatatctatgggaacatctcagctctgaggtgaatttcttatgacttgacagtaactt

SEQ ID NO: 140172 - DNA, 80 bp, synthetic construct
  misc_feature 1..80: note = Artificially Synthesized Probe
  source 1..80: mol_type = other DNA
gtcaaattcaagatctcatagattttcttctatttttaatagaagttttattgttttagatttaacattaaggtctgtga

SEQ ID NO: 140173 - DNA, 80 bp, synthetic construct
  misc_feature 1..80: note = Artificially Synthesized Probe
  source 1..80: mol_type = other DNA
tttcttttttttcagacagagtctcgctctgtcacccaggctagagtgcagtggcgcaatcttggctcactgcaacctct

SEQ ID NO: 140174 - DNA, 80 bp, synthetic construct; identical to SEQ ID NO: 43380
  misc_feature 1..80: note = Artificially Synthesized Probe
  source 1..80: mol_type = other DNA

SEQ ID NO: 140175 - DNA, 80 bp, synthetic construct
  misc_feature 1..80: note = Artificially Synthesized Probe
  source 1..80: mol_type = other DNA
tcatgtgaccttgtgttctaggatgaattaattctggtagcttttttgtaaactatactgtaccaacgtttgagagtaca

SEQ ID NO: 140176 - DNA, 80 bp, synthetic construct
  misc_feature 1..80: note = Artificially Synthesized Probe
  source 1..80: mol_type = other DNA
agcaactgtccatatctcttgattctgccacaaatgctttatatactcaccattttatgtttatgtgttctgagtgatag

SEQ ID NO: 140177 - DNA, 80 bp, synthetic construct
  misc_feature 1..80: note = Artificially Synthesized Probe
  source 1..80: mol_type = other DNA
agcataaatcattatgttgttctgaccttcatattccttactttttcagagatgcggtatttgtaggttgtgatggcaga

SEQ ID NO: 140178 - DNA, 80 bp, synthetic construct; identical to SEQ ID NO: 43381
  misc_feature 1..80: note = Artificially Synthesized Probe
  source 1..80: mol_type = other DNA

SEQ ID NO: 140179 - DNA, 80 bp, synthetic construct
  misc_feature 1..80: note = Artificially Synthesized Probe
  source 1..80: mol_type = other DNA
cttaataaaggaccctatggaagaataattcctttacaaggaaacatgcataaaattaacaaagttagaaagatgtaatt

SEQ ID NO: 140180 - DNA, 80 bp, synthetic construct
  misc_feature 1..80: note = Artificially Synthesized Probe
  source 1..80: mol_type = other DNA
ggcctcttgattcatggctggtctttttgctcctccattggtggttctcaatcctaatgtgtatcggagtcacccagagg

SEQ ID NO: 140181 - DNA, 80 bp, synthetic construct
  misc_feature 1..80: note = Artificially Synthesized Probe
  source 1..80: mol_type = other DNA
ttgccaggaagtttaaaacataatggccttttagccattatgatatttgattatgtcttatgattttgaaaatcagaaag

SEQ ID NO: 140182 - DNA, 80 bp, synthetic construct
  misc_feature 1..80: note = Artificially Synthesized Probe
  source 1..80: mol_type = other DNA
aatattttcctgtattgccaaataattagcaaagtggtagtcattaatttactttgagtacccaatcatatattagccta

SEQ ID NO: 140183 - DNA, 80 bp, synthetic construct; identical to SEQ ID NO: 43382
  misc_feature 1..80: note = Artificially Synthesized Probe
  source 1..80: mol_type = other DNA

SEQ ID NO: 140184 - DNA, 80 bp, synthetic construct
  misc_feature 1..80: note = Artificially Synthesized Probe
  source 1..80: mol_type = other DNA
cttgaaaccaggaggtggaggtttcagtcagccgagattgtgccattgcactccagcctgggcgacaagagcaaaactct

SEQ ID NO: 140185 - DNA, 80 bp, synthetic construct
  misc_feature 1..80: note = Artificially Synthesized Probe
  source 1..80: mol_type = other DNA
ttgatcactttggctaaaattttttttgttgttttttacaaattttattgatcttttcaaataactagcttttggcttca

SEQ ID NO: 140186 - DNA, 80 bp, synthetic construct
  misc_feature 1..80: note = Artificially Synthesized Probe
  source 1..80: mol_type = other DNA
agcatttaaagcgacagaattccctgtaagctctgcttttgtagtattcaagataatttttcttgctgttttgggtgttg

SEQ ID NO: 140187 - DNA, 80 bp, synthetic construct
  misc_feature 1..80: note = Artificially Synthesized Probe
  source 1..80: mol_type = other DNA
aaaattctgtctctataaaaaatagaaaaattagccaggtgtggtggtgcatacctgctgtcccagctgctagggaggct

SEQ ID NO: 140188 - DNA, 80 bp, synthetic construct; identical to SEQ ID NO: 43383
  misc_feature 1..80: note = Artificially Synthesized Probe
  source 1..80: mol_type = other DNA

SEQ ID NO: 140189 - DNA, 80 bp, synthetic construct
  misc_feature 1..80: note = Artificially Synthesized Probe
  source 1..80: mol_type = other DNA
ttttctccgtgttattggttggctcccagctttccacaggccccgcatgcctgtgtctcagagggctctccttccatgct

SEQ ID NO: 140190 - DNA, 80 bp, synthetic construct
  misc_feature 1..80: note = Artificially Synthesized Probe
  source 1..80: mol_type = other DNA
tgtctttgttggtcttggggaggagtttcctgcttctcccctagcggtagctgatacctcacttaagtttttggtcacag

SEQ ID NO: 140191 - DNA, 80 bp, synthetic construct; identical to SEQ ID NO: 43291
  misc_feature 1..80: note = Artificially Synthesized Probe
  source 1..80: mol_type = other DNA

SEQ ID NO: 140192 - DNA, 80 bp, synthetic construct
  misc_feature 1..80: note = Artificially Synthesized Probe
  source 1..80: mol_type = other DNA
tttgcttttccctggggttcgagtgtggttgcccttctcctgctgtgtgaggcttttgctttatggcagagaactgcctg

SEQ ID NO: 140193 - DNA, 80 bp, synthetic construct; identical to SEQ ID NO: 43384
  misc_feature 1..80: note = Artificially Synthesized Probe
  source 1..80: mol_type = other DNA

SEQ ID NO: 140194 - DNA, 80 bp, synthetic construct
  misc_feature 1..80: note = Artificially Synthesized Probe
  source 1..80: mol_type = other DNA
gctttctgatgggctcgagaaaagttagacttttgcagattatccgactctttctcattgttagcatgggagtgatatag

SEQ ID NO: 140195 - DNA, 80 bp, synthetic construct
  misc_feature 1..80: note = Artificially Synthesized Probe
  source 1..80: mol_type = other DNA
tagtgggtgtctgctggtaattaatctcagcttttgtttctctgaaaaatcactactttctcttcagttttgaaggaaat

SEQ ID NO: 140196 - DNA, 80 bp, synthetic construct; identical to SEQ ID NO: 43385
  misc_feature 1..80: note = Artificially Synthesized Probe
  source 1..80: mol_type = other DNA

SEQ ID NO: 140197 - DNA, 80 bp, synthetic construct
  misc_feature 1..80: note = Artificially Synthesized Probe
  source 1..80: mol_type = other DNA
ctagcccttctcttctggaatttcagttgtgtatatattagcctgtttgatattgtctcataagttactgattctgtgct

SEQ ID NO: 140198 - DNA, 80 bp, synthetic construct
  misc_feature 1..80: note = Artificially Synthesized Probe
  source 1..80: mol_type = other DNA
agtagttattgactggaggtggatattgtgaattttgggttgttctgtggttcattttgttgtcttcctttaaagaatgt

SEQ ID NO: 140199 - DNA, 80 bp, synthetic construct
  misc_feature 1..80: note = Artificially Synthesized Probe
  source 1..80: mol_type = other DNA
cttcaggtgtgtgaagaagaagaatcattctggctggtcagaacttgaagatcactttatttgatctcttggaatttgat

SEQ ID NO: 140200 - DNA, 80 bp, synthetic construct
  misc_feature 1..80: note = Artificially Synthesized Probe
  source 1..80: mol_type = other DNA
tcactcctttctcattctctgaacaccaagttccaactgattcatttttgtcacatgtagtaggtgatacactgtgctct

SEQ ID NO: 140201 - DNA, 80 bp, synthetic construct; identical to SEQ ID NO: 43386
  misc_feature 1..80: note = Artificially Synthesized Probe
  source 1..80: mol_type = other DNA

SEQ ID NO: 140202 - DNA, 80 bp, synthetic construct
  misc_feature 1..80: note = Artificially Synthesized Probe
  source 1..80: mol_type = other DNA
agatagtgaaggaagccatatgaatttggtttctggtctgcagtatacttcagcaactctgatttccttttgaaattctt

SEQ ID NO: 140203 - DNA, 80 bp, synthetic construct
  misc_feature 1..80: note = Artificially Synthesized Probe
  source 1..80: mol_type = other DNA
gctgtgaggcccagtcttagcaacgttttctgtgaaagggtgtccagattgattgctagagtgtataggagtgaaaaatt

SEQ ID NO: 140204 - DNA, 80 bp, synthetic construct
  misc_feature 1..80: note = Artificially Synthesized Probe
  source 1..80: mol_type = other DNA
tgttgctgaaattagctgttttttgtgcctcctgcataacatctatgcctttggactttgagggaaggtctcattgtttc

SEQ ID NO: 140205 - DNA, 80 bp, synthetic construct
  misc_feature 1..80: note = Artificially Synthesized Probe
  source 1..80: mol_type = other DNA
tacactctggtgacaatagcgttctggttaatgtgcaccagctaagactatttttttttccttcttcattcttccaagct

SEQ ID NO: 140206 - DNA, 80 bp, synthetic construct; identical to SEQ ID NO: 43387
  misc_feature 1..80: note = Artificially Synthesized Probe
  source 1..80: mol_type = other DNA

SEQ ID NO: 140207 - DNA, 80 bp, synthetic construct
  misc_feature 1..80: note = Artificially Synthesized Probe
  source 1..80: mol_type = other DNA
gtgtctacattgttggcatgctttacaagcatttaaaagaagagatctacataaatatattatgagactacggtgtagtg

SEQ ID NO: 140208 - DNA, 80 bp, synthetic construct
  misc_feature 1..80: note = Artificially Synthesized Probe
  source 1..80: mol_type = other DNA
tttacagtccaatcactgtaaggactgctgttcagaaacaattgctgtggttctcctagagcacatctccaagaacgaaa

SEQ ID NO: 140209 - DNA, 80 bp, synthetic construct
  misc_feature 1..80: note = Artificially Synthesized Probe
  source 1..80: mol_type = other DNA
gatcatataaagtcaaataataaacaaatgcatactttggaacatgaaagtttcctgttctccagagaaaatcactctaa

SEQ ID NO: 140210 - DNA, 80 bp, synthetic construct; identical to SEQ ID NO: 43388
  misc_feature 1..80: note = Artificially Synthesized Probe
  source 1..80: mol_type = other DNA

SEQ ID NO: 140211 - DNA, 80 bp, synthetic construct
  misc_feature 1..80: note = Artificially Synthesized Probe
  source 1..80: mol_type = other DNA
atatggaaactggtacatcatggatgctcttgcttcctggtaatgatgacagccaaacatctacaaggctgcaaggtagt

SEQ ID NO: 140212 - DNA, 80 bp, synthetic construct
  misc_feature 1..80: note = Artificially Synthesized Probe
  source 1..80: mol_type = other DNA
tgcttaaaattttttagaaggtctccaaatgataaggcataacactgttgattgctgctttggagagctttgtcctgaga

SEQ ID NO: 140213 - DNA, 80 bp, synthetic construct; identical to SEQ ID NO: 43389
  misc_feature 1..80: note = Artificially Synthesized Probe
  source 1..80: mol_type = other DNA

SEQ ID NO: 140214 - DNA, 80 bp, synthetic construct
  misc_feature 1..80: note = Artificially Synthesized Probe
  source 1..80: mol_type = other DNA
ttttaactaaaatttgagagactgctttatagagaaagtgatttcattgtactttcatattcaggccttcagttttccag

SEQ ID NO: 140215 - DNA, 80 bp, synthetic construct
  misc_feature 1..80: note = Artificially Synthesized Probe
  source 1..80: mol_type = other DNA
acataggtcatttatctggaaagacttcagtgccctggagagttactctgttctctagagtatcccaatcacaggctctt

SEQ ID NO: 140216 - DNA, 80 bp, synthetic construct
  misc_feature 1..80: note = Artificially Synthesized Probe
  source 1..80: mol_type = other DNA
tacatgccagtgtcatgtatttgtgccatagaattgttttatatatactatgtttactggctaacatttaagcagaaagc

SEQ ID NO: 140217 - DNA, 80 bp, synthetic construct
  misc_feature 1..80: note = Artificially Synthesized Probe
  source 1..80: mol_type = other DNA
aatttgcagtgcatgctgttttgaaacatttattttgaagagctcagcatgtctgagttaaggcataaatcaatgaccta

SEQ ID NO: 140218 - DNA, 80 bp, synthetic construct
  misc_feature 1..80: note = Artificially Synthesized Probe
  source 1..80: mol_type = other DNA
tggagggttatagagtatgaagacccaggactgcatggagactgcagtgttgagtagtatataggtttgccactccaggc

SEQ ID NO: 140219 - DNA, 80 bp, synthetic construct
  misc_feature 1..80: note = Artificially Synthesized Probe
  source 1..80: mol_type = other DNA
atatagcaggcagccaggttgccaaaaggaatggtatgtgctcaggtttctcagacccaggtcccagtttattaacttgt

SEQ ID NO: 140220 - DNA, 80 bp, synthetic construct
  misc_feature 1..80: note = Artificially Synthesized Probe
  source 1..80: mol_type = other DNA
ttaagtatcacattcttaatttaaaagtaagtttaagaaacccatattttctttttctttctttctttcttttttttttt

SEQ ID NO: 140221 - DNA, 80 bp, synthetic construct
  misc_feature 1..80: note = Artificially Synthesized Probe
  source 1..80: mol_type = other DNA
atttttatatttttagtagagacgaggtttcaccatgttagccaggctggtctcaaactcctgaccttagacgatctgcc

SEQ ID NO: 140222 - DNA, 80 bp, synthetic construct
  misc_feature 1..80: note = Artificially Synthesized Probe
  source 1..80: mol_type = other DNA
ccggcgtctcgtttggtattcactttcgcgactcaggtgaactaacctgcgagaagctggttgtgcgctgaggcgaccag

SEQ ID NO: 140223 - DNA, 80 bp, synthetic construct
  misc_feature 1..80: note = Artificially Synthesized Probe
  source 1..80: mol_type = other DNA
gaatgagtttgatacaaacaatcgtcctattgagtaaataccattattattgccatgttgcagatggcaacaccaaggca

SEQ ID NO: 140224 - DNA, 80 bp, synthetic construct; identical to SEQ ID NO: 43787
  misc_feature 1..80: note = Artificially Synthesized Probe
  source 1..80: mol_type = other DNA

SEQ ID NO: 140225 - DNA, 80 bp, synthetic construct
  misc_feature 1..80: note = Artificially Synthesized Probe
  source 1..80: mol_type = other DNA
ccgctcaggtgagcgccgcgtcctcctggcctcccccgaatcctaaagccctgtgagggccgcctgctcaggtccccggg

SEQ ID NO: 140226 - DNA, 80 bp, synthetic construct
  misc_feature 1..80: note = Artificially Synthesized Probe
  source 1..80: mol_type = other DNA
atatattatttttattattttcttttaagacagagttttgctcttgttgcccaggctggagtgcaaaggcgcgatctcgg

SEQ ID NO: 140227 - DNA, 80 bp, synthetic construct
  misc_feature 1..80: note = Artificially Synthesized Probe
  source 1..80: mol_type = other DNA
atgatccgcccgccttggcctcctaaagtgctgggattacaggcgtgagccaccgtgcccaacccagactatgtattcta

SEQ ID NO: 140228 - DNA, 80 bp, synthetic construct
  misc_feature 1..80: note = Artificially Synthesized Probe
  source 1..80: mol_type = other DNA
gaagtgattggctgaggagctgagctgaggtgtcctgatatgtgtgcaattccaagtagctaaagatgaagcaagaaaaa

SEQ ID NO: 140229 - DNA, 80 bp, synthetic construct; identical to SEQ ID NO: 43788
  misc_feature 1..80: note = Artificially Synthesized Probe
  source 1..80: mol_type = other DNA

SEQ ID NO: 140230 - DNA, 80 bp, synthetic construct
  misc_feature 1..80: note = Artificially Synthesized Probe
  source 1..80: mol_type = other DNA
tattgttgctcagtgggagcatgaggagagagtgggcatcagtggctctggggcagggtctctcctctgagatggggatt

SEQ ID NO: 140231 - DNA, 80 bp, synthetic construct
  misc_feature 1..80: note = Artificially Synthesized Probe
  source 1..80: mol_type = other DNA
tgcttgatgacgctcagaggctcctctaccgcaatgtgatgctggagaactttacacttctggcctctctgggtaaggtt

SEQ ID NO: 140232 - DNA, 80 bp, synthetic construct
  misc_feature 1..80: note = Artificially Synthesized Probe
  source 1..80: mol_type = other DNA
tctccccaagctgccccacagctgtgcaggaaagggtttgggggtcaggagtcttgcagtcagcttgatggatcttatcc

SEQ ID NO: 140233 - DNA, 80 bp, synthetic construct; identical to SEQ ID NO: 43789
  misc_feature 1..80: note = Artificially Synthesized Probe
  source 1..80: mol_type = other DNA

SEQ ID NO: 140234 - DNA, 80 bp, synthetic construct
  misc_feature 1..80: note = Artificially Synthesized Probe
  source 1..80: mol_type = other DNA
tcagggatggattcatatcataccagtaggcccagatattttgataccaaggcaaggggttgtcgctgatttctatcttt

SEQ ID NO: 140235 - DNA, 80 bp, synthetic construct
  misc_feature 1..80: note = Artificially Synthesized Probe
  source 1..80: mol_type = other DNA
atagtccttgagcatcagctatttggttgcagttggttttttctggacctggacataaccttctgtgccgtgttcctgtg

SEQ ID NO: 140236 - DNA, 80 bp, synthetic construct; identical to SEQ ID NO: 43790
  misc_feature 1..80: note = Artificially Synthesized Probe
  source 1..80: mol_type = other DNA

SEQ ID NO: 140237 - DNA, 80 bp, synthetic construct
  misc_feature 1..80: note = Artificially Synthesized Probe
  source 1..80: mol_type = other DNA
gggacgaggcgcgtgtcgagcgacagcccgagcagctgcgctttcatcctgagggggccacagtggccgcggagggctgg

SEQ ID NO: 140238 - DNA, 80 bp, synthetic construct
  misc_feature 1..80: note = Artificially Synthesized Probe
  source 1..80: mol_type = other DNA
agagaaacccttaaaaagacaagagggcagggtcccagttttgaggagttgcaaagttcacctatcagagaagtccttgc

SEQ ID NO: 140239 - DNA, 80 bp, synthetic construct
  misc_feature 1..80: note = Artificially Synthesized Probe
  source 1..80: mol_type = other DNA
aagcctttggtcagaaatatttacttgttcagcaccagagactacatgctgggaaaaagacgtatgaatgcagtgaatgt

SEQ ID NO: 140240 - DNA, 80 bp, synthetic construct
  misc_feature 1..80: note = Artificially Synthesized Probe
  source 1..80: mol_type = other DNA
gtgaatgtggaaaagctttcaggcataattccacacttgttcagcatcacaaaatccacactggagtaaggccttatgag

SEQ ID NO: 140241 - DNA, 80 bp, synthetic construct
  misc_feature 1..80: note = Artificially Synthesized Probe
  source 1..80: mol_type = other DNA
cttacaagtgcagcgactgtgggaaattttttacccaatgctcaagcctcatgcaacatcaaaaagttcacactggagaa

SEQ ID NO: 140242 - DNA, 80 bp, synthetic construct; identical to SEQ ID NO: 43791
  misc_feature 1..80: note = Artificially Synthesized Probe
  source 1..80: mol_type = other DNA

SEQ ID NO: 140243 - DNA, 80 bp, synthetic construct
  misc_feature 1..80: note = Artificially Synthesized Probe
  source 1..80: mol_type = other DNA
agtgattgtgtgaaatcctttagccagcgtttcaacctcattcaacaccagaaagttcacagtggaaaaaatcttgaagg

SEQ ID NO: 140244 - DNA, 80 bp, synthetic construct
  misc_feature 1..80: note = Artificially Synthesized Probe
  source 1..80: mol_type = other DNA
ttatgtactgtctctgaatcaatatgacctcacttaaaacagaaactctgaggatggcctttatgagggagctggcaatt

SEQ ID NO: 140245 - DNA, 80 bp, synthetic construct
  misc_feature 1..80: note = Artificially Synthesized Probe
  source 1..80: mol_type = other DNA
gagttgggggaggaaaggagtggtcttggttcaaatgtgactcacttttgctgttcttgtgaatgttagatcttctttaa

SEQ ID NO: 140246 - DNA, 80 bp, synthetic construct; identical to SEQ ID NO: 43792
  misc_feature 1..80: note = Artificially Synthesized Probe
  source 1..80: mol_type = other DNA

SEQ ID NO: 140247 - DNA, 80 bp, synthetic construct
  misc_feature 1..80: note = Artificially Synthesized Probe
  source 1..80: mol_type = other DNA
tttgcctgttttttaaaacatttggttggttacaagttcttaatatttctggagacaaattccttatttgatataagcat

SEQ ID NO: 140248 - DNA, 80 bp, synthetic construct
  misc_feature 1..80: note = Artificially Synthesized Probe
  source 1..80: mol_type = other DNA
agtgatcagatcttggatggatatcaaaaactgaacagacaggaattcctgttgcatcagatgtgactgaaagaaaggga

SEQ ID NO: 140249 - DNA, 80 bp, synthetic construct
  misc_feature 1..80: note = Artificially Synthesized Probe
  source 1..80: mol_type = other DNA
ccatgcttggccttgttttcagttcttaacagtatctttcctagagcagattgtcttaattttatggagcccaatttatc

SEQ ID NO: 140250 - DNA, 80 bp, synthetic construct
  misc_feature 1..80: note = Artificially Synthesized Probe
  source 1..80: mol_type = other DNA
accatcctggctaacacagtgaaactccctctcaactaaaaatacaaaaaattagctgggcgtggtggcggctgcctgta

SEQ ID NO: 140251 - DNA, 80 bp, synthetic construct; identical to SEQ ID NO: 43793
  misc_feature 1..80: note = Artificially Synthesized Probe
  source 1..80: mol_type = other DNA

SEQ ID NO: 140252 - DNA, 80 bp, synthetic construct
  misc_feature 1..80: note = Artificially Synthesized Probe
  source 1..80: mol_type = other DNA
gaggctgttttcaagttgtggcagaaaaggtacaacatgatttgaggaaatactgcattggaaaataaataaatgttcac

SEQ ID NO: 140253 - DNA, 80 bp, synthetic construct; identical to SEQ ID NO: 43785
  misc_feature 1..80: note = Artificially Synthesized Probe
  source 1..80: mol_type = other DNA

SEQ ID NO: 140254 - DNA, 80 bp, synthetic construct
  misc_feature 1..80: note = Artificially Synthesized Probe
  source 1..80: mol_type = other DNA
ccgcggccgccggccggcgtccggccttcccagcacccggcccagggctggagctggctgcagggctggcccgcggcgac

SEQ ID NO: 140255 - DNA, 80 bp, synthetic construct; identical to SEQ ID NO: 43804
  misc_feature 1..80: note = Artificially Synthesized Probe
  source 1..80: mol_type = other DNA

SEQ ID NO: 140256 - DNA, 80 bp, synthetic construct
  misc_feature 1..80: note = Artificially Synthesized Probe
  source 1..80: mol_type = other DNA
cccggccaagcggtcactcccggtgagtgggagcatgcccacagcagggtcagcccagggcccgcggcatccgattgtta

SEQ ID NO: 140257 - DNA, 80 bp, synthetic construct
  misc_feature 1..80: note = Artificially Synthesized Probe
  source 1..80: mol_type = other DNA
gggaataattagagtctccagagggcacccaggggggcctgccgtaggcgggaggtgcctgggacccaaagccctgctgt

SEQ ID NO: 140258 - DNA, 80 bp, synthetic construct
  misc_feature 1..80: note = Artificially Synthesized Probe
  source 1..80: mol_type = other DNA
gttttcccacctgttccctggtatcacaagtcctgccttcaggacacaggtgacaaccagcaaggctggcaattggtctg

SEQ ID NO: 140259 - DNA, 80 bp, synthetic construct
  misc_feature 1..80: note = Artificially Synthesized Probe
  source 1..80: mol_type = other DNA
ggaggggctcatgctacacctctgctgtccgacaggaggggggtttgacacgtctacacctgtgctatccgagaggagcg

SEQ ID NO: 140260 - DNA, 80 bp, synthetic construct; identical to SEQ ID NO: 43805
  misc_feature 1..80: note = Artificially Synthesized Probe
  source 1..80: mol_type = other DNA

SEQ ID NO: 140261 - DNA, 80 bp, synthetic construct
  misc_feature 1..80: note = Artificially Synthesized Probe
  source 1..80: mol_type = other DNA
tcatttagcccggcataaccgcaatagtttcacgttaacatgtggtctggattttaaaaaattatccgtgaagcatttca

SEQ ID NO: 140262 - DNA, 80 bp, synthetic construct
  misc_feature 1..80: note = Artificially Synthesized Probe
  source 1..80: mol_type = other DNA
ggagtgtgccacgtgttatcacgtttaatccttacgtcctgagatccgtgttaacccaagtcttagatgcagaaactgat

SEQ ID NO: 140263 - DNA, 80 bp, synthetic construct
  misc_feature 1..80: note = Artificially Synthesized Probe
  source 1..80: mol_type = other DNA
tggtgagcttgtcgaatgctggaggtaccttgtcatttttttggccctgaaggccaggagacatccaggtgttcagagag

SEQ ID NO: 140264 - DNA, 80 bp, synthetic construct
  misc_feature 1..80: note = Artificially Synthesized Probe
  source 1..80: mol_type = other DNA
acccaatcctctttaccaacctgtactcaccccgatccctccctgctgtccaggacaactttactgtgccttggccccaa

SEQ ID NO: 140265 - DNA, 80 bp, synthetic construct; identical to SEQ ID NO: 43806
  misc_feature 1..80: note = Artificially Synthesized Probe
  source 1..80: mol_type = other DNA

SEQ ID NO: 140266 - DNA, 80 bp, synthetic construct
  misc_feature 1..80: note = Artificially Synthesized Probe
  source 1..80: mol_type = other DNA
ggtggatggctggatggctggatgggtaggtaggtagatagaaagatacacacatatatacagatattgtgtgtatactt

SEQ ID NO: 140267 - DNA, 80 bp, synthetic construct
  misc_feature 1..80: note = Artificially Synthesized Probe
  source 1..80: mol_type = other DNA
gggatcctcatggaagccctgtgggtagataacattataatgttataattcccaccggaggctcagaggctaaatgcctc

SEQ ID NO: 140268 - DNA, 80 bp, synthetic construct
  misc_feature 1..80: note = Artificially Synthesized Probe
  source 1..80: mol_type = other DNA
gtctttcctggatggatcaaaggccatgctgtgtttagacaggccccatgcccgtcttctgcacctgtcccgagggtcct

SEQ ID NO: 140269 - DNA, 80 bp, synthetic construct; identical to SEQ ID NO: 43807
  misc_feature 1..80: note = Artificially Synthesized Probe
  source 1..80: mol_type = other DNA

SEQ ID NO: 140270 - DNA, 80 bp, synthetic construct
  misc_feature 1..80: note = Artificially Synthesized Probe
  source 1..80: mol_type = other DNA
ttcatctcctggctctgcttttctgcacatcagctccaaactcaagagaccctcctgcagggaggcctggaggagaccct

SEQ ID NO: 140271 - DNA, 80 bp, synthetic construct
  misc_feature 1..80: note = Artificially Synthesized Probe
  source 1..80: mol_type = other DNA
cgtctgaagggaggccgggaggagaccctcctgaagggaggccagatggagaccctcctgaagggaggccgggcggagac

SEQ ID NO: 140272 - DNA, 80 bp, synthetic construct; identical to SEQ ID NO: 43808
  misc_feature 1..80: note = Artificially Synthesized Probe
  source 1..80: mol_type = other DNA

SEQ ID NO: 140273 - DNA, 80 bp, synthetic construct
  misc_feature 1..80: note = Artificially Synthesized Probe
  source 1..80: mol_type = other DNA
cagcacagcccacagccctgcattcctgaaaataaacaaaataaacaggtaaatgcctggacagcgtcgggcgtgagggc

SEQ ID NO: 140274 - DNA, 80 bp, synthetic construct
  misc_feature 1..80: note = Artificially Synthesized Probe
  source 1..80: mol_type = other DNA
gagaccctcctgaagggaggccgggaggagaccctcatgaagacaggccgggaggagacccttctgaagggaggccaggc

SEQ ID NO: 140275 - DNA, 80 bp, synthetic construct
  misc_feature 1..80: note = Artificially Synthesized Probe
  source 1..80: mol_type = other DNA
caccctcaagcgatcaccatggccctgggatggatgtggtgccctggcttgtgagactgggccatgcactcaccctggga

SEQ ID NO: 140276 - DNA, 80 bp, synthetic construct
  misc_feature 1..80: note = Artificially Synthesized Probe
  source 1..80: mol_type = other DNA
tctcagggggttaaagggcaaggtcgtgtatctcaatgttagcagtctttgccccaccatgtaaatccaaagctgaatat

SEQ ID NO: 140277 - DNA, 80 bp, synthetic construct; identical to SEQ ID NO: 43809
  misc_feature 1..80: note = Artificially Synthesized Probe
  source 1..80: mol_type = other DNA

SEQ ID NO: 140278 - DNA, 80 bp, synthetic construct
  misc_feature 1..80: note = Artificially Synthesized Probe
  source 1..80: mol_type = other DNA
gccctgcccagagccgggcacaggagatggtgcaggtcctcttcagcccggcagggccaggcctccattagcctctggac

SEQ ID NO: 140279 - DNA, 80 bp, synthetic construct
  misc_feature 1..80: note = Artificially Synthesized Probe
  source 1..80: mol_type = other DNA
tccaccaccctcctcactactggtcctgtgttcaggccacacacgcaagacaccacaagccacggacaaagggaaacgtg

SEQ ID NO: 140280 - DNA, 80 bp, synthetic construct
  misc_feature 1..80: note = Artificially Synthesized Probe
  source 1..80: mol_type = other DNA
gtgagacatggttaaagggggacccgtgagccacggatgaaggggggcatgtgagccatggacaagaggacatgtgagcc

SEQ ID NO: 140281 - DNA, 80 bp, synthetic construct
  misc_feature 1..80: note = Artificially Synthesized Probe
  source 1..80: mol_type = other DNA
cacaggtggaaagggcatgtgagccacaaatgaagggaacacgtgagtcccagaggaagggacacatgggccagcaggat

SEQ ID NO: 140282 - DNA, 80 bp, synthetic construct; identical to SEQ ID NO: 43810
  misc_feature 1..80: note = Artificially Synthesized Probe
  source 1..80: mol_type = other DNA

SEQ ID NO: 140283 - DNA, 80 bp, synthetic construct
  misc_feature 1..80: note = Artificially Synthesized Probe
  source 1..80: mol_type = other DNA
cacaggacagagctcaccgggaggtgatcattctgccctgcaaatagaaaagaggaagaggatatctgaggcaaaaagga

SEQ ID NO: 140284 - DNA, 80 bp, synthetic construct
  misc_feature 1..80: note = Artificially Synthesized Probe
  source 1..80: mol_type = other DNA
ccaggggctgcatgtggctggcagtttggcaggcagcccactgggcccaagaggctctgtgtgtttgcctggcagtcatc

SEQ ID NO: 140285 - DNA, 80 bp, synthetic construct
  misc_feature 1..80: note = Artificially Synthesized Probe
  source 1..80: mol_type = other DNA
gcagagactgggaccacattcaattacttgcccagagtcacagctacaagatgacagtgttggaatttaaactgggcctg

SEQ ID NO: 140286 - DNA, 80 bp, synthetic construct; identical to SEQ ID NO: 43811
  misc_feature 1..80: note = Artificially Synthesized Probe
  source 1..80: mol_type = other DNA

SEQ ID NO: 140287 - DNA, 80 bp, synthetic construct
  misc_feature 1..80: note = Artificially Synthesized Probe
  source 1..80: mol_type = other DNA
ggacggcagcccctctgccaggtgctcctccgcagggctctacccagggctggggccacctcaggagaagcagatcccta

SEQ ID NO: 140288 - DNA, 80 bp, synthetic construct
  misc_feature 1..80: note = Artificially Synthesized Probe
  source 1..80: mol_type = other DNA
tgtccgggccagccgttcatcagcagcaaatgccatcatgccatcactggggaggcgcagagccaatggccttcatggca

SEQ ID NO: 140289 - DNA, 80 bp, synthetic construct
  misc_feature 1..80: note = Artificially Synthesized Probe
  source 1..80: mol_type = other DNA
gtggccccacctgctgaaagcccagcaaaatgtgcccaggcctggcagcttgaagccctgctgcaaaattggcctaccag

SEQ ID NO: 140290 - DNA, 80 bp, synthetic construct
  misc_feature 1..80: note = Artificially Synthesized Probe
  source 1..80: mol_type = other DNA
tgtgggtcttggaagcagtttgctcgtccctgctttccggaacctctaagccaggcgagcccaaaggccttcctggggcc

SEQ ID NO: 140291 - DNA, 80 bp, synthetic construct; identical to SEQ ID NO: 43812
  misc_feature 1..80: note = Artificially Synthesized Probe
  source 1..80: mol_type = other DNA

SEQ ID NO: 140292 - DNA, 80 bp, synthetic construct
  misc_feature 1..80: note = Artificially Synthesized Probe
  source 1..80: mol_type = other DNA
cagaaacaacccgctgaacaacaggccaggggttgcttctgcagaccggagggggatggaagggcatccactgcaggaaa

SEQ ID NO: 140293 - DNA, 80 bp, synthetic construct
  misc_feature 1..80: note = Artificially Synthesized Probe
  source 1..80: mol_type = other DNA
aggaagtcccaggatttcagggtcaagggaaattttggggtcatgaacttcaaccccctcatcagcgcttcagtctccac

SEQ ID NO: 140294 - DNA, 80 bp, synthetic construct
  misc_feature 1..80: note = Artificially Synthesized Probe
  source 1..80: mol_type = other DNA
gacaaccaagagtaaatgcaagagaggggcaacttatctcttctcccagcattggggtatgcagagcagtagaagacagt

SEQ ID NO: 140295 - DNA, 80 bp, synthetic construct; identical to SEQ ID NO: 43813
  misc_feature 1..80: note = Artificially Synthesized Probe
  source 1..80: mol_type = other DNA

SEQ ID NO: 140296 - DNA, 80 bp, synthetic construct
  misc_feature 1..80: note = Artificially Synthesized Probe
  source 1..80: mol_type = other DNA
tagttgggtgagtggatggatggatggatggatggatggatacatgggtggatgggtagatggatgggtgagtgcatgga

SEQ ID NO: 140297 - DNA, 80 bp, synthetic construct
  misc_feature 1..80: note = Artificially Synthesized Probe
  source 1..80: mol_type = other DNA
atggatacaagggtggaggaataggtagatggatagatgggtgagtgggtgagtggatggatggagggatggatggatgg

SEQ ID NO: 140298 - DNA, 80 bp, synthetic construct
  misc_feature 1..80: note = Artificially Synthesized Probe
  source 1..80: mol_type = other DNA
tggatgggtgggtggatggatggatacatgggtggatgggtagatggatgggtgaatgcatgggtagatggatggagaga

SEQ ID NO: 140299 - DNA, 80 bp, synthetic construct; identical to SEQ ID NO: 43814
  misc_feature 1..80: note = Artificially Synthesized Probe
  source 1..80: mol_type = other DNA

SEQ ID NO: 140300 - DNA, 80 bp, synthetic construct
  misc_feature 1..80: note = Artificially Synthesized Probe
  source 1..80: mol_type = other DNA
gtgagtagagactttcccaggatgctggttgcagctcagacccctttgcagttgacctgggtctgcccccacggtcaggg

SEQ ID NO: 140301 - DNA, 80 bp, synthetic construct
  misc_feature 1..80: note = Artificially Synthesized Probe
  source 1..80: mol_type = other DNA
cttatgcacttcatcttaccagtgcggaaaccgagacaggccaggctggggcagcggttggcccagggtcactccaccag

SEQ ID NO: 140302 - DNA, 80 bp, synthetic construct
  misc_feature 1..80: note = Artificially Synthesized Probe
  source 1..80: mol_type = other DNA
atccaggcacttttaactttatggggcccagaaacttaagaaggagaggtgtgggagggatcggggagtccaggagagaa

SEQ ID NO: 140303 - DNA, 80 bp, synthetic construct; identical to SEQ ID NO: 43815
  misc_feature 1..80: note = Artificially Synthesized Probe
  source 1..80: mol_type = other DNA

SEQ ID NO: 140304 - DNA, 80 bp, synthetic construct; identical to SEQ ID NO: 43795
  misc_feature 1..80: note = Artificially Synthesized Probe
  source 1..80: mol_type = other DNA

SEQ ID NO: 140305 - DNA, 80 bp, synthetic construct
  misc_feature 1..80: note = Artificially Synthesized Probe
  source 1..80: mol_type = other DNA
gctgaaacacagggcagagggctccaggtctcggggtctgcagccgggcctgtgagctgccatcgaggccaccgtctgca

SEQ ID NO: 140306 - DNA, 80 bp, synthetic construct
  misc_feature 1..80: note = Artificially Synthesized Probe
  source 1..80: mol_type = other DNA
tgaccctttccattctgcaattgttacaaacttataacttgaattgttttactctcagaagtagcctggtgcccacaaag

SEQ ID NO: 140307 - DNA, 80 bp, synthetic construct
  misc_feature 1..80: note = Artificially Synthesized Probe
  source 1..80: mol_type = other DNA
attcaggggttcctggtgggcaaggaggggcagcgcccttcccaccagctcagctctgtggcttcgggcggtgctgcagg

SEQ ID NO: 140308 - DNA, 80 bp, synthetic construct; identical to SEQ ID NO: 43816
  misc_feature 1..80: note = Artificially Synthesized Probe
  source 1..80: mol_type = other DNA

SEQ ID NO: 140309 - DNA, 80 bp, synthetic construct
  misc_feature 1..80: note = Artificially Synthesized Probe
  source 1..80: mol_type = other DNA
ccccatgcttattcttgctgtgcttttacaagcggattctagataccaggtcatttcgcctgtaaggacttcagcaagag

SEQ ID NO: 140310 - DNA, 80 bp, synthetic construct
  misc_feature 1..80: note = Artificially Synthesized Probe
  source 1..80: mol_type = other DNA
acgagtgagttgctcacctgtgtgattcaaactggagttggttcgaggttgtccacccacatatccctttggccatgttc

SEQ ID NO: 140311 - DNA, 80 bp, synthetic construct
  misc_feature 1..80: note = Artificially Synthesized Probe
  source 1..80: mol_type = other DNA
atgagtgcatgtgctggtgggggcaggcacagagggatgctgcaggaaggaggcaccgaccacccagaggggtgagtgtg

SEQ ID NO: 140312 - DNA, 80 bp, synthetic construct; identical to SEQ ID NO: 43817
  misc_feature 1..80: note = Artificially Synthesized Probe
  source 1..80: mol_type = other DNA

SEQ ID NO: 140313 - DNA, 80 bp, synthetic construct
  misc_feature 1..80: note = Artificially Synthesized Probe
  source 1..80: mol_type = other DNA
tccacacagcatgcttgaggtgctgttgccaacaatgggagattggtggtggacaggcaaggaacagatgtccacacaga

SEQ ID NO: 140314 - DNA, 80 bp, synthetic construct
  misc_feature 1..80: note = Artificially Synthesized Probe
  source 1..80: mol_type = other DNA
ttttaaaatattagaagtgcacgagaatatccaagcttctgttggaaaccagaggggagtggccacatgggcccgtggtg

SEQ ID NO: 140315 - DNA, 80 bp, synthetic construct
  misc_feature 1..80: note = Artificially Synthesized Probe
  source 1..80: mol_type = other DNA
agagatgccctcccctcctttctcctggagtcttgtcaccaccgatagtgccctagatatcaggccatggtggactcatc

SEQ ID NO: 140316 - DNA, 80 bp, synthetic construct
  misc_feature 1..80: note = Artificially Synthesized Probe
  source 1..80: mol_type = other DNA
gaagggctggggagtgagtggacacaggtccccagggaagtgaacaccaatgagatttcaccaaacacccatgagagcag

SEQ ID NO: 140317 - DNA, 80 bp, synthetic construct; identical to SEQ ID NO: 43818
  misc_feature 1..80: note = Artificially Synthesized Probe
  source 1..80: mol_type = other DNA

SEQ ID NO: 140318 - DNA, 80 bp, synthetic construct
  misc_feature 1..80: note = Artificially Synthesized Probe
  source 1..80: mol_type = other DNA
cgggagccagggacaactttccacagggcctgggagggagcagcccggagccgaccacgccaccacgagccaccgtgtcc

SEQ ID NO: 140319 - DNA, 80 bp, synthetic construct
  misc_feature 1..80: note = Artificially Synthesized Probe
  source 1..80: mol_type = other DNA
gtgtacacatgtgtgtgttccagggcagctgtgtgtgtggaatgtgtctcaggatggccctgtgtatgtgtgcctcagtt

SEQ ID NO: 140320 - DNA, 80 bp, synthetic construct
  misc_feature 1..80: note = Artificially Synthesized Probe
  source 1..80: mol_type = other DNA
atcggaaggacccgtgctttggttcttctcattacaaaagctgtccctgcccagggtgagggacttagacgcagagggtt

SEQ ID NO: 140321 - DNA, 80 bp, synthetic construct
  misc_feature 1..80: note = Artificially Synthesized Probe
  source 1..80: mol_type = other DNA
ttgccttttttacaaagatggggttgtgcctcgagtactgttagtgttttgctttcttggttggggatgacacagggttg

SEQ ID NO: 140322 - DNA, 80 bp, synthetic construct; identical to SEQ ID NO: 43819
  misc_feature 1..80: note = Artificially Synthesized Probe
  source 1..80: mol_type = other DNA

SEQ ID NO: 140323 - DNA, 80 bp, synthetic construct
  misc_feature 1..80: note = Artificially Synthesized Probe
  source 1..80: mol_type = other DNA
agctcgttggcggcggccggcgtggcgggcggagcgggcctcggagcggaggtgagtgcggatgcgccgcctgggcgcgc

SEQ ID NO: 140324 - DNA, 80 bp, synthetic construct
  misc_feature 1..80: note = Artificially Synthesized Probe
  source 1..80: mol_type = other DNA
ttgggctgggccccccagggtgggagctcctgcgtcactgggaattgtctcagctgcgtccacacttccagggatccgtc

SEQ ID NO: 140325 - DNA, 80 bp, synthetic construct
  misc_feature 1..80: note = Artificially Synthesized Probe
  source 1..80: mol_type = other DNA
cggaccctcatcagcgtcactctctgtatctatagcgtggccgatgacgcactaattgagtaccctgcctgatcattttt

SEQ ID NO: 140326 - DNA, 80 bp, synthetic construct
  misc_feature 1..80: note = Artificially Synthesized Probe
  source 1..80: mol_type = other DNA
aggcatgggcataggagagtcatttgcccagatggctggcatgtggcagagcctgggttccaggcctggcatgcatttct

SEQ ID NO: 140327 - DNA, 80 bp, synthetic construct
  misc_feature 1..80: note = Artificially Synthesized Probe
  source 1..80: mol_type = other DNA
tgggcaacatagtgagaccccatctctactaaaaaaaaaattgaagtaagttagccaggcatggtagtgtgcacctgtac

SEQ ID NO: 140328 - DNA, 80 bp, synthetic construct; identical to SEQ ID NO: 43820
  misc_feature 1..80: note = Artificially Synthesized Probe
  source 1..80: mol_type = other DNA

SEQ ID NO: 140329 - DNA, 80 bp, synthetic construct
  misc_feature 1..80: note = Artificially Synthesized Probe
  source 1..80: mol_type = other DNA
aagctcagagcttagacttcctgtaagctttttggtttgtggtttgtgtctcaacctcttgtcgtataggcctcattttc

SEQ ID NO: 140330 - DNA, 80 bp, synthetic construct
  misc_feature 1..80: note = Artificially Synthesized Probe
  source 1..80: mol_type = other DNA
ccaggttcgagcaattctcctgcctcagcctcccggtaacggggactacaggcacccaccaccacgcccggctaattttt

SEQ ID NO: 140331 - DNA, 80 bp, synthetic construct; identical to SEQ ID NO: 43821
  misc_feature 1..80: note = Artificially Synthesized Probe
  source 1..80: mol_type = other DNA

SEQ ID NO: 140332 - DNA, 80 bp, synthetic construct
  misc_feature 1..80: note = Artificially Synthesized Probe
  source 1..80: mol_type = other DNA
ggtgtctccccgctttccttccggaatcgtctctcccttccaggcttactgccggggccacatgggcttcccaggccagc

SEQ ID NO: 140333 - DNA, 80 bp, synthetic construct
  misc_feature 1..80: note = Artificially Synthesized Probe
  source 1..80: mol_type = other DNA
ccctggcagatatccctctttcttcatttcttccctactttttctccaaatgatgaaagaaaaacactcatagggaagcg

SEQ ID NO: 140334 - DNA, 80 bp, synthetic construct
  misc_feature 1..80: note = Artificially Synthesized Probe
  source 1..80: mol_type = other DNA
tgggggcccctctgctgcagggagggtcatgggaccagagaccccgggagtgcggcctggagttgggggctcgcccacct

SEQ ID NO: 140335 - DNA, 80 bp, synthetic construct; identical to SEQ ID NO: 43822
  misc_feature 1..80: note = Artificially Synthesized Probe
  source 1..80: mol_type = other DNA

SEQ ID NO: 140336 - DNA, 80 bp, synthetic construct
  misc_feature 1..80: note = Artificially Synthesized Probe
  source 1..80: mol_type = other DNA
ggggaggggtcctgggtgttcaggatggaggaccttctcctcataggccgtgtgcaccccatgcacatatgctatatgag

SEQ ID NO: 140337 - DNA, 80 bp, synthetic construct; identical to SEQ ID NO: 43796
  misc_feature 1..80: note = Artificially Synthesized Probe
  source 1..80: mol_type = other DNA

SEQ ID NO: 140338 - DNA, 80 bp, synthetic construct
  misc_feature 1..80: note = Artificially Synthesized Probe
  source 1..80: mol_type = other DNA
gtcctcgctcagtggcctgtgagcggaggcctgagtgcgacaggtgtggtggccatcttggccggggggggggggggggg

SEQ ID NO: 140339 - DNA, 80 bp, synthetic construct
  misc_feature 1..80: note = Artificially Synthesized Probe
  source 1..80: mol_type = other DNA
tactgggaaaggctggattctagaaggcagagccactgatagatcagatgtgggggtgggggaaggaaggtaacttagca

SEQ ID NO: 140340 - DNA, 80 bp, synthetic construct; identical to SEQ ID NO: 43823
  misc_feature 1..80: note = Artificially Synthesized Probe
  source 1..80: mol_type = other DNA

SEQ ID NO: 140341 - DNA, 80 bp, synthetic construct
  misc_feature 1..80: note = Artificially Synthesized Probe
  source 1..80: mol_type = other DNA
aagttcacggtgcaggtcacacagttcacggtgacgtctatgatgctgttgatggtgcaggtcacgtgatcatggagaag

SEQ ID NO: 140342 - DNA, 80 bp, synthetic construct
  misc_feature 1..80: note = Artificially Synthesized Probe
  source 1..80: mol_type = other DNA
cgttgatggtgcaggtcacacagttcacagtaacgtctatgatgctgttgatggtgcaggtcacgtggtcatggtaaagt

SEQ ID NO: 140343 - DNA, 80 bp, synthetic construct
  misc_feature 1..80: note = Artificially Synthesized Probe
  source 1..80: mol_type = other DNA
acctctacctccatcttcacgtggcctcctcctgcgtccgtctcccttctcttcatggggccctctccgaaggacacctg

SEQ ID NO: 140344 - DNA, 80 bp, synthetic construct; identical to SEQ ID NO: 43824
  misc_feature 1..80: note = Artificially Synthesized Probe
  source 1..80: mol_type = other DNA

SEQ ID NO: 140345 - DNA, 80 bp, synthetic construct
  misc_feature 1..80: note = Artificially Synthesized Probe
  source 1..80: mol_type = other DNA
gcaggcaggggtgcgagtgggcaggggtgcaagcaggcaggggtgcgagcgggcaggggtgcaagcaggcaggggtgcga

SEQ ID NO: 140346 - DNA, 80 bp, synthetic construct
  misc_feature 1..80: note = Artificially Synthesized Probe
  source 1..80: mol_type = other DNA
tgaggtggcgcagggtggatgccagcccaagtgctgcagggcctggggcctctcactctgtgtccatggcgagtgtctca

SEQ ID NO: 140347 - DNA, 80 bp, synthetic construct
  misc_feature 1..80: note = Artificially Synthesized Probe
  source 1..80: mol_type = other DNA
agaagagacgaaaccctgatgttcatggagccctggcgtggtgtcgcacagcaaggccaggtccagctggcgaacctggg

SEQ ID NO: 140348 - DNA, 80 bp, synthetic construct
  misc_feature 1..80: note = Artificially Synthesized Probe
  source 1..80: mol_type = other DNA
caggcccaccgtcccaggcccaccctgctctgccatcccctctccagtcccaggcccgaagtaacacgtctgccagtccc

SEQ ID NO: 140349 - DNA, 80 bp, synthetic construct
  misc_feature 1..80: note = Artificially Synthesized Probe
  source 1..80: mol_type = other DNA
tggcacactgcaagtacttggtaggtaccagctgctgtggttgcagcccatgggtttcaggagactccgtgggacctgtg

SEQ ID NO: 140350 - DNA, 80 bp, synthetic construct; identical to SEQ ID NO: 43825
  misc_feature 1..80: note = Artificially Synthesized Probe
  source 1..80: mol_type = other DNA

SEQ ID NO: 140351 - DNA, 80 bp, synthetic construct
  misc_feature 1..80: note = Artificially Synthesized Probe
  source 1..80: mol_type = other DNA
tgggatagcagcatgcagcatgggggacagggagggcagtctgtctcacccacagcgatgtccccacactcggtcaatat

SEQ ID NO: 140352 - DNA, 80 bp, synthetic construct
  misc_feature 1..80: note = Artificially Synthesized Probe
  source 1..80: mol_type = other DNA
aatggggagatttcactttaaaacctggatttctcaaaaatcagaaagtctgccactgtgctccgtgtcctggcagccac

SEQ ID NO: 140353 - DNA, 80 bp, synthetic construct; identical to SEQ ID NO: 43826
  misc_feature 1..80: note = Artificially Synthesized Probe
  source 1..80: mol_type = other DNA

SEQ ID NO: 140354 - DNA, 80 bp, synthetic construct
  misc_feature 1..80: note = Artificially Synthesized Probe
  source 1..80: mol_type = other DNA
ctctctcttcccttcaccctcaaaacacccacctgtgggccctggaggtggcaggaggaacgcaggagtgaggagacagc

SEQ ID NO: 140355 - DNA, 80 bp, synthetic construct
  misc_feature 1..80: note = Artificially Synthesized Probe
  source 1..80: mol_type = other DNA
tggagaagtgattccgtccagagtgagcctcggagggtgtcctgcagagctgggggcagcgttatagcaaggttcagtca

SEQ ID NO: 140356 - DNA, 80 bp, synthetic construct
  misc_feature 1..80: note = Artificially Synthesized Probe
  source 1..80: mol_type = other DNA
aggcctctgcagcctccgcagcagtggggagagcgaccgggccagcccccagggctgtgtgagtgtggtggcaggtgcca

SEQ ID NO: 140357 - DNA, 80 bp, synthetic construct
  misc_feature 1..80: note = Artificially Synthesized Probe
  source 1..80: mol_type = other DNA
tttccctacaccctcgggtctgggactccctgaaggacagctggaggctgcaggccctcagggctggctgcctgcagtgg

SEQ ID NO: 140358 - DNA, 80 bp, synthetic construct
  misc_feature 1..80: note = Artificially Synthesized Probe
  source 1..80: mol_type = other DNA
tctgccttccccatcttcttcccagcgccctccccatcttcccagcgccttccccattttccctcctggccagccagccc

SEQ ID NO: 140359 - DNA, 80 bp, synthetic construct; identical to SEQ ID NO: 43827
  misc_feature 1..80: note = Artificially Synthesized Probe
  source 1..80: mol_type = other DNA

SEQ ID NO: 140360 - DNA, 80 bp, synthetic construct
  misc_feature 1..80: note = Artificially Synthesized Probe
  source 1..80: mol_type = other DNA
ggcccccaggcccggcagagctgccctggattgggagcaagctatggctgggagcgggccccacggcaggagggtccgag

SEQ ID NO: 140361 - DNA, 80 bp, synthetic construct
  misc_feature 1..80: note = Artificially Synthesized Probe
  source 1..80: mol_type = other DNA
acagggccacccctcaccaggccactgtggccagaggtccacgcaggacagccccgcccagacgtccactgccacccggc

SEQ ID NO: 140362 - DNA, 80 bp, synthetic construct; identical to SEQ ID NO: 43828
  misc_feature 1..80: note = Artificially Synthesized Probe
  source 1..80: mol_type = other DNA

SEQ ID NO: 140363 - DNA, 80 bp, synthetic construct
  misc_feature 1..80: note = Artificially Synthesized Probe
  source 1..80: mol_type = other DNA
cggtcacagctgagcgaggtcctggagaggggccgggagcctccaccacagcctgccgcccagggcctcgaactgcccaa

SEQ ID NO: 140364 - DNA, 80 bp, synthetic construct
  misc_feature 1..80: note = Artificially Synthesized Probe
  source 1..80: mol_type = other DNA
tacagctgaacacactgagactgagcccccagcctgggaatggcagtgcagtgggaatgcctgtcactcaggccccctct

SEQ ID NO: 140365 - DNA, 80 bp, synthetic construct
  misc_feature 1..80: note = Artificially Synthesized Probe
  source 1..80: mol_type = other DNA
tgccctggaacccagcactgacactggaggcccatttcctcatctgcaaaccgggaccgacggcttcttccaggcgtgta

SEQ ID NO: 140366 - DNA, 80 bp, synthetic construct; identical to SEQ ID NO: 43829
  misc_feature 1..80: note = Artificially Synthesized Probe
  source 1..80: mol_type = other DNA

SEQ ID NO: 140367 - DNA, 80 bp, synthetic construct
  misc_feature 1..80: note = Artificially Synthesized Probe
  source 1..80: mol_type = other DNA
cagtccagccctgttctgactccctgataagggtcctcatgggttcatctcaggatgtgtgttctctcttcccgcctcct

SEQ ID NO: 140368 - DNA, 80 bp, synthetic construct
  misc_feature 1..80: note = Artificially Synthesized Probe
  source 1..80: mol_type = other DNA
ggcctcatcggtcccggtttctcatgcagagacctcactcgaggtgggatgggctccgttcccaaaaaccagaggccgtg

SEQ ID NO: 140369 - DNA, 80 bp, synthetic construct
  misc_feature 1..80: note = Artificially Synthesized Probe
  source 1..80: mol_type = other DNA
cacccagaccagcttcacactgtcacacgttgtgatcttagtggtgtgtgacttcggcaggatctccaaggcaagctctg

SEQ ID NO: 140370 - DNA, 80 bp, synthetic construct
  misc_feature 1..80: note = Artificially Synthesized Probe
  source 1..80: mol_type = other DNA
gaaagagtaatggaaaataactagggtttctagcatcaacaagcagtcacgtggtgattggttgttttaggggagggatg

SEQ ID NO: 140371 - DNA, 80 bp, synthetic construct; identical to SEQ ID NO: 43830
  misc_feature 1..80: note = Artificially Synthesized Probe
  source 1..80: mol_type = other DNA

SEQ ID NO: 140372 - DNA, 80 bp, synthetic construct
  misc_feature 1..80: note = Artificially Synthesized Probe
  source 1..80: mol_type = other DNA
ggcctcccccaggaggccgagagcaaggcccccacccaccctgcccagagcgtcgctgcaagggagctcaaagccagggg

SEQ ID NO: 140373 - DNA, 80 bp, synthetic construct
  misc_feature 1..80: note = Artificially Synthesized Probe
  source 1..80: mol_type = other DNA
aggcacccccgtctttggattttaaagtgggttctggggctgtgggcaccgttgcccattctaaccacctgccacctcca

SEQ ID NO: 140374 - DNA, 80 bp, synthetic construct
  misc_feature 1..80: note = Artificially Synthesized Probe
  source 1..80: mol_type = other DNA
cctcttcctacaccctttgggcaggggagaaggaccctcagacaaatgtgctgatggaggcagctggcgtttgctgggct

SEQ ID NO: 140375 - DNA, 80 bp, synthetic construct; identical to SEQ ID NO: 43831
  misc_feature 1..80: note = Artificially Synthesized Probe
  source 1..80: mol_type = other DNA

SEQ ID NO: 140376 - DNA, 80 bp, synthetic construct
  misc_feature 1..80: note = Artificially Synthesized Probe
  source 1..80: mol_type = other DNA
gccccagctggactctacccgggctcctgagcaccaactccctgccaggcccaggatgggggcaagcagaagacctgcgg

SEQ ID NO: 140377 - DNA, 80 bp, synthetic construct
  misc_feature 1..80: note = Artificially Synthesized Probe
  source 1..80: mol_type = other DNA
atcccacctcccatcactggtgtcccatctaccctgcaaggccatcccccttgacgaaggggccctattcaggccggatc

SEQ ID NO: 140378 - DNA, 80 bp, synthetic construct
  misc_feature 1..80: note = Artificially Synthesized Probe
  source 1..80: mol_type = other DNA
ccgtggagggttgtctaggagactgagcagagctgggttggggcctggccactgatgaggtcctggtgtccttctgggta

SEQ ID NO: 140379 - DNA, 80 bp, synthetic construct
  misc_feature 1..80: note = Artificially Synthesized Probe
  source 1..80: mol_type = other DNA
ctgtcattttcgaagacatcattttctttccccatgtgcccccttatctccctcctgttaaaggatctcgaataggcacc

SEQ ID NO: 140380 - DNA, 80 bp, synthetic construct; identical to SEQ ID NO: 43832
  misc_feature 1..80: note = Artificially Synthesized Probe
  source 1..80: mol_type = other DNA

SEQ ID NO: 140381 - DNA, 80 bp, synthetic construct
  misc_feature 1..80: note = Artificially Synthesized Probe
  source 1..80: mol_type = other DNA
cgatgctcaggatgaaggccggggcacagccgaactcctcccttttcccagccttgctgtctcgggtgacctgggaccgg

SEQ ID NO: 140382 - DNA, 80 bp, synthetic construct
  misc_feature 1..80: note = Artificially Synthesized Probe
  source 1..80: mol_type = other DNA
cctggtgggcagccagaggccggagggaaccgacagactggaccgagctggtccgaggacgggccggtgcctcccaaaca

SEQ ID NO: 140383 - DNA, 80 bp, synthetic construct
  misc_feature 1..80: note = Artificially Synthesized Probe
  source 1..80: mol_type = other DNA
ttcttggcccttgtgtggtgtccagggtgggacaggtggggccctgggattgggtgtggacagcctccctaacccccggc

SEQ ID NO: 140384 - DNA, 80 bp, synthetic construct
  misc_feature 1..80: note = Artificially Synthesized Probe
  source 1..80: mol_type = other DNA
tgaagagtcacatcatcagagcagccgctcaggtcacccagaaggccccatgtccccactcttctctctcaggccagggc

SEQ ID NO: 140385 - DNA, 80 bp, synthetic construct; identical to SEQ ID NO: 43833
  misc_feature 1..80: note = Artificially Synthesized Probe
  source 1..80: mol_type = other DNA

SEQ ID NO: 140386 - DNA, 80 bp, synthetic construct
  misc_feature 1..80: note = Artificially Synthesized Probe
  source 1..80: mol_type = other DNA
gaaggcacgggccagccctgacgacagcagaaacaaccaggagaatgaagcctaccccacaccagggatggatgcagctg

SEQ ID NO: 140387 - DNA, 80 bp, synthetic construct
  misc_feature 1..80: note = Artificially Synthesized Probe
  source 1..80: mol_type = other DNA
ccaattggacagtggcactccagttgggcagtgcagccgagtgtgcagggctcccaggcctggtccccaggggatggcca

SEQ ID NO: 140388 - DNA, 80 bp, synthetic construct; identical to SEQ ID NO: 43797
  misc_feature 1..80: note = Artificially Synthesized Probe
  source 1..80: mol_type = other DNA

SEQ ID NO: 140389 - DNA, 80 bp, synthetic construct; identical to SEQ ID NO: 43834
  misc_feature 1..80: note = Artificially Synthesized Probe
  source 1..80: mol_type = other DNA

SEQ ID NO: 140390 - DNA, 80 bp, synthetic construct
  misc_feature 1..80: note = Artificially Synthesized Probe
  source 1..80: mol_type = other DNA
gcaacccaatccgagggatcttctccagcagaggccccaggaggggctgggaaggaagggccaggggtgggaccaggggc

SEQ ID NO: 140391 - DNA, 80 bp, synthetic construct
  misc_feature 1..80: note = Artificially Synthesized Probe
  source 1..80: mol_type = other DNA
tggcattcccccacacccccagccagagccaccccaacctgctcttgagttaccagagcgcttggccggctaaagagggg

SEQ ID NO: 140392 - DNA, 80 bp, synthetic construct
  misc_feature 1..80: note = Artificially Synthesized Probe
  source 1..80: mol_type = other DNA
ttggcggggccagaacccaaggcctggagcacatgccgccccatgcccaccccagctccaaggactgggacgcgtccccg

SEQ ID NO: 140393 - DNA, 80 bp, synthetic construct
  misc_feature 1..80: note = Artificially Synthesized Probe
  source 1..80: mol_type = other DNA
cagagggacagggtgtggaggcagtggggtggggccaccctttgttcagcgcggaagaagcacagttatagacagtcctg

SEQ ID NO: 140394 - DNA, 80 bp, synthetic construct; identical to SEQ ID NO: 43835
  misc_feature 1..80: note = Artificially Synthesized Probe
  source 1..80: mol_type = other DNA

SEQ ID NO: 140395 - DNA, 80 bp, synthetic construct
  misc_feature 1..80: note = Artificially Synthesized Probe
  source 1..80: mol_type = other DNA
gatgggtgagtgatgggtgaacgggtgggtggatgggcaggtggatgggcaggaggatggggggacgggcacgtggatgg

SEQ ID NO: 140396 - DNA, 80 bp, synthetic construct
  misc_feature 1..80: note = Artificially Synthesized Probe
  source 1..80: mol_type = other DNA
aatgggtggatgaatgaatgggtgaatgggtgggtggatagatgggtggacaaatggtaaaagggtggatgggtgggtgg

SEQ ID NO: 140397 - DNA, 80 bp, synthetic construct; identical to SEQ ID NO: 43836
  misc_feature 1..80: note = Artificially Synthesized Probe
  source 1..80: mol_type = other DNA

SEQ ID NO: 140398 - DNA, 80 bp, synthetic construct
  misc_feature 1..80: note = Artificially Synthesized Probe
  source 1..80: mol_type = other DNA
tggatggatggatgatgatgatggatgagtgaatggatggatggatggatggacggacagacggacggatgggtggatgg

SEQ ID NO: 140399 - DNA, 80 bp, synthetic construct
  misc_feature 1..80: note = Artificially Synthesized Probe
  source 1..80: mol_type = other DNA
gtatacttcagagctaaggacttccatttccctgggtagaaggaaagatgggccagtacagttgggcaggttgttcactg

SEQ ID NO: 140400 - DNA, 80 bp, synthetic construct
  misc_feature 1..80: note = Artificially Synthesized Probe
  source 1..80: mol_type = other DNA
atgatgatgatgatggatggatgggtggatggatggatggatggatggatagatggatggatgggtgggttggtggatgg

SEQ ID NO: 140401 - DNA, 80 bp, synthetic construct
  misc_feature 1..80: note = Artificially Synthesized Probe
  source 1..80: mol_type = other DNA
tggatgggacagtgtggcaaaggctttactgctaagtcccagtggcttcctgcagttcttcaccctccctgggcctcagt

SEQ ID NO: 140402 - DNA, 80 bp, synthetic construct; identical to SEQ ID NO: 43837
  misc_feature 1..80: note = Artificially Synthesized Probe
  source 1..80: mol_type = other DNA

SEQ ID NO: 140403 - DNA, 80 bp, synthetic construct
  misc_feature 1..80: note = Artificially Synthesized Probe
  source 1..80: mol_type = other DNA
ggctgcttgagtgcccggaaagcatggcagctgcttccccacatgtgtgatctaagtgtgcaaggaggaagctgcagtgc

SEQ ID NO: 140404 - DNA, 80 bp, synthetic construct
  misc_feature 1..80: note = Artificially Synthesized Probe
  source 1..80: mol_type = other DNA
gaggagtgttaaagaatgtgtggccatattttaaaaccatcacggagactgacaattggacaatctccttccaaagtcaa

SEQ ID NO: 140405 - DNA, 80 bp, synthetic construct
  misc_feature 1..80: note = Artificially Synthesized Probe
  source 1..80: mol_type = other DNA
agtggacagagagtgagaaacctcttcacggaatgttgtgggattatctacaggatatgttgttacatgaaaaaaaggtc

SEQ ID NO: 140406 - DNA, 80 bp, synthetic construct
  misc_feature 1..80: note = Artificially Synthesized Probe
  source 1..80: mol_type = other DNA
ggattatctacaggatatgttgttacatgaaaaaaaggtcaggtgcagaacagtgagcgtagccgacgatcttctgttga

SEQ ID NO: 140407 - DNA, 80 bp, synthetic construct; identical to SEQ ID NO: 43838
  misc_feature 1..80: note = Artificially Synthesized Probe
  source 1..80: mol_type = other DNA

SEQ ID NO: 140408 - DNA, 80 bp, synthetic construct
  misc_feature 1..80: note = Artificially Synthesized Probe
  source 1..80: mol_type = other DNA
cctcccacctggcttctcctcgggctcttggtccagagccatgcaccacatcggccctgacatgctttccattttctttg

SEQ ID NO: 140409 - DNA, 80 bp, synthetic construct
  misc_feature 1..80: note = Artificially Synthesized Probe
  source 1..80: mol_type = other DNA
tcctctccctctcaggacagtaaccgggcctgcctactgcctcccgagagccgactcctggggcccgccgggcagggctt

SEQ ID NO: 140410 - DNA, 80 bp, synthetic construct
  misc_feature 1..80: note = Artificially Synthesized Probe
  source 1..80: mol_type = other DNA
cggacgccgtccgcacccctgaggaccttccattgcaaccccatcctgcgtgcctgcggaagctgccctcagtggccgga

SEQ ID NO: 140411 - DNA, 80 bp, synthetic construct
  misc_feature 1..80: note = Artificially Synthesized Probe
  source 1..80: mol_type = other DNA
atccaggactccgtaaaggccacctcctccaggaggcctttatgatgctccatctgggctgaggtccccactctgagccc

SEQ ID NO: 140412 - DNA, 80 bp, synthetic construct
  misc_feature 1..80: note = Artificially Synthesized Probe
  source 1..80: mol_type = other DNA
agtgcagggcaggagatgtgcagggcaggagatgtgcagggcaggagatgtgcagggctaggagccagccctcccaggag

SEQ ID NO: 140413 - DNA, 80 bp, synthetic construct; identical to SEQ ID NO: 43839
  misc_feature 1..80: note = Artificially Synthesized Probe
  source 1..80: mol_type = other DNA

SEQ ID NO: 140414 - DNA, 80 bp, synthetic construct
  misc_feature 1..80: note = Artificially Synthesized Probe
  source 1..80: mol_type = other DNA
cccaaattgggcaggaccctcctccccggtgcaggcagtccctgggcacagcaggaagagccagccggaagtacaggtac

SEQ ID NO: 140415 - DNA, 80 bp, synthetic construct
  misc_feature 1..80: note = Artificially Synthesized Probe
  source 1..80: mol_type = other DNA
cagggtctctgagagtgctccaggcctgaggcctgtcccttcagctcccagctgctctgctgctggctgtgtgaccctgg

SEQ ID NO: 140416 - DNA, 80 bp, synthetic construct; identical to SEQ ID NO: 43840
  misc_feature 1..80: note = Artificially Synthesized Probe
  source 1..80: mol_type = other DNA

SEQ ID NO: 140417 - DNA, 80 bp, synthetic construct
  misc_feature 1..80: note = Artificially Synthesized Probe
  source 1..80: mol_type = other DNA
ggcagggagaccctggctgacggcaggatctggaggttaccctgtaaggcctggtggcagggagaccctggctgacggca

SEQ ID NO: 140418 - DNA, 80 bp, synthetic construct
  misc_feature 1..80: note = Artificially Synthesized Probe
  source 1..80: mol_type = other DNA
ccctccccatggcaggtgtaagcatccacctgggccctcctggacgctgccaggaccctgccctggggcagttcctgcag

SEQ ID NO: 140419 - DNA, 80 bp, synthetic construct
  misc_feature 1..80: note = Artificially Synthesized Probe
  source 1..80: mol_type = other DNA
gaagggtccctgttccatctggcgggatgccctctcccttcctgcttctaggtaggggctgagccgagcatcccttctaa

SEQ ID NO: 140420 - DNA, 80 bp, synthetic construct; identical to SEQ ID NO: 43841
  misc_feature 1..80: note = Artificially Synthesized Probe
  source 1..80: mol_type = other DNA

SEQ ID NO: 140421 - DNA, 80 bp, synthetic construct
  misc_feature 1..80: note = Artificially Synthesized Probe
  source 1..80: mol_type = other DNA
ggactcgggccgcggtcagcacagcctccagatgttcttcaaagcatgccccacccccttggctgcttgcggttgctggt

SEQ ID NO: 140422 - DNA, 80 bp, synthetic construct
  misc_feature 1..80: note = Artificially Synthesized Probe
  source 1..80: mol_type = other DNA
ccaagggtgccagggaggctggcggccaggcccaggccatggagctccccgaggcccagccaaggcaggccagggacggg

SEQ ID NO: 140423 - DNA, 80 bp, synthetic construct
  misc_feature 1..80: note = Artificially Synthesized Probe
  source 1..80: mol_type = other DNA
ccagctcgaggaccaagcccaccctggacgagacaccagagaacccacagctggaggctgcccagctccctgaggtggac

SEQ ID NO: 140424 - DNA, 80 bp, synthetic construct
  misc_feature 1..80: note = Artificially Synthesized Probe
  source 1..80: mol_type = other DNA
ccccagccccggggcccccccagagcaggggcaccagccccctccagcccggttcctatcccgaataccaggccagtggg

SEQ ID NO: 140425 - DNA, 80 bp, synthetic construct
  misc_feature 1..80: note = Artificially Synthesized Probe
  source 1..80: mol_type = other DNA
caaaacccttccctgcggatgtggctgggcacgcattcaccaatgggccactggtgtttgccttccatcagccccaggga

SEQ ID NO: 140426 - DNA, 80 bp, synthetic construct; identical to SEQ ID NO: 43842
  misc_feature 1..80: note = Artificially Synthesized Probe
  source 1..80: mol_type = other DNA

SEQ ID NO: 140427 - DNA, 80 bp, synthetic construct
  misc_feature 1..80: note = Artificially Synthesized Probe
  source 1..80: mol_type = other DNA
cagccccttaccccacacctcctgggggccccctggctgccaccaggagtatgttctttaacggccagcccagcccaggc

SEQ ID NO: 140428 - DNA, 80 bp, synthetic construct
  misc_feature 1..80: note = Artificially Synthesized Probe
  source 1..80: mol_type = other DNA
gcaagacaccgggacccagagagaagctgccagccgtgagaagcagccagggcggctccccagcactgttcacctacaac

SEQ ID NO: 140429 - DNA, 80 bp, synthetic construct; identical to SEQ ID NO: 43843
  misc_feature 1..80: note = Artificially Synthesized Probe
  source 1..80: mol_type = other DNA

SEQ ID NO: 140430 - DNA, 80 bp, synthetic construct; identical to SEQ ID NO: 43798
  misc_feature 1..80: note = Artificially Synthesized Probe
  source 1..80: mol_type = other DNA

SEQ ID NO: 140431 - DNA, 80 bp, synthetic construct
  misc_feature 1..80: note = Artificially Synthesized Probe
  source 1..80: mol_type = other DNA
tggaggagaccccattcccccacgagggccccgaggtgggtcggggagggctgcagggcttcccccgtgcgccgcctccg

SEQ ID NO: 140432 - DNA, 80 bp, synthetic construct
  misc_feature 1..80: note = Artificially Synthesized Probe
  source 1..80: mol_type = other DNA
agcggtctccaggcccccctgggctcccctcgccccccgctgcccccagagtccctgccgacgcacacgcgggcttgctc

SEQ ID NO: 140433 - DNA, 80 bp, synthetic construct
  misc_feature 1..80: note = Artificially Synthesized Probe
  source 1..80: mol_type = other DNA
cagaggcgctcaacggcatggagtaccagtcggacaacccggagatcgacagcagcttcatcgacgtcttcgcggacgag

SEQ ID NO: 140434 - DNA, 80 bp, synthetic construct; identical to SEQ ID NO: 43844
  misc_feature 1..80: note = Artificially Synthesized Probe
  source 1..80: mol_type = other DNA

SEQ ID NO: 140435 - DNA, 80 bp, synthetic construct
  misc_feature 1..80: note = Artificially Synthesized Probe
  source 1..80: mol_type = other DNA
gcgcagaccccgcgccccgggtcccgagagccgccgccctccccgaggagacccgcagctcccggcgccgccggctgccc

SEQ ID NO: 140436 - DNA, 80 bp, synthetic construct
  misc_feature 1..80: note = Artificially Synthesized Probe
  source 1..80: mol_type = other DNA
aggaccgcaggctccgcgagtacgacttcgcctcggagtccgaggaggacgagcagcctccgccgcggggccccggcttc

SEQ ID NO: 140437 - DNA, 80 bp, synthetic construct
  misc_feature 1..80: note = Artificially Synthesized Probe
  source 1..80: mol_type = other DNA
ccggcaggagccctcaggcccgtggcccgtctcgaagcctggagacgggagcggccgccagggagggaggccccaagtgt

SEQ ID NO: 140438 - DNA, 80 bp, synthetic construct
  misc_feature 1..80: note = Artificially Synthesized Probe
  source 1..80: mol_type = other DNA
cctcctcccgggcccggacgtgcggggcagcgagcgccggggcccggcgggggccgcagccttgcccggagcggagcgtt

SEQ ID NO: 140439 - DNA, 80 bp, synthetic construct
  misc_feature 1..80: note = Artificially Synthesized Probe
  source 1..80: mol_type = other DNA
tgcgttctcctccagccgcctgtgcgggagaaatgggagcaagccccggtctcctgataccagagcagccgccgcccagc

SEQ ID NO: 140440 - DNA, 80 bp, synthetic construct; identical to SEQ ID NO: 43845
  misc_feature 1..80: note = Artificially Synthesized Probe
  source 1..80: mol_type = other DNA

SEQ ID NO: 140441 - DNA, 80 bp, synthetic construct
  misc_feature 1..80: note = Artificially Synthesized Probe
  source 1..80: mol_type = other DNA
gggatgccccgccggccagcagctcctgcctttgccaggacggcgaggatgccggttccctcgagccacagctgccaagg

SEQ ID NO: 140442 - DNA, 80 bp, synthetic construct
  misc_feature 1..80: note = Artificially Synthesized Probe
  source 1..80: mol_type = other DNA
cgtggaggaaccaggagcaaagggcccatctccccagcccttgctcctccaatcagggtgggtggcccctcaagtggaaa

SEQ ID NO: 140443 - DNA, 80 bp, synthetic construct
  misc_feature 1..80: note = Artificially Synthesized Probe
  source 1..80: mol_type = other DNA
ccgaccctccccagaagacggtgccgtcagatccaccgtacccctcttttttgctgcttgaggaagtatccccgatgctg

SEQ ID NO: 140444 - DNA, 80 bp, synthetic construct; identical to SEQ ID NO: 43846
  misc_feature 1..80: note = Artificially Synthesized Probe
  source 1..80: mol_type = other DNA

SEQ ID NO: 140445 - DNA, 80 bp, synthetic construct
  misc_feature 1..80: note = Artificially Synthesized Probe
  source 1..80: mol_type = other DNA
ccaccgtggaagcggttcaggggaggcctggggggacgtggccctgcccagcctccttccatccgggacatgcagccctt

SEQ ID NO: 140446 - DNA, 80 bp, synthetic construct
  misc_feature 1..80: note = Artificially Synthesized Probe
  source 1..80: mol_type = other DNA
ccagcaagcagcctggcccacagctggatgccgggagtttagcaaagtgcagccccgaccaggaactttcatttcctaag

SEQ ID NO: 140447 - DNA, 80 bp, synthetic construct
  misc_feature 1..80: note = Artificially Synthesized Probe
  source 1..80: mol_type = other DNA
ctgacttggcatttcagggtgacggggctccacctctggatgccacctggccttttggtgccagtcccagccatgctgcc

SEQ ID NO: 140448 - DNA, 80 bp, synthetic construct
  misc_feature 1..80: note = Artificially Synthesized Probe
  source 1..80: mol_type = other DNA
ccaacacccaccctagcaggaggtcccaggacccagctttgagcccccccatacgtcagctccagctcccagggcctgga

SEQ ID NO: 140449 - DNA, 80 bp, synthetic construct; identical to SEQ ID NO: 43847
  misc_feature 1..80: note = Artificially Synthesized Probe
  source 1..80: mol_type = other DNA

SEQ ID NO: 140450 - DNA, 80 bp, synthetic construct
  misc_feature 1..80: note = Artificially Synthesized Probe
  source 1..80: mol_type = other DNA
ccatgagccttcaggaggaggccgagcccaccccaagccccccgtcccctaatagggagtccctggcgctggccttgaca

SEQ ID NO: 140451 - DNA, 80 bp, synthetic construct
  misc_feature 1..80: note = Artificially Synthesized Probe
  source 1..80: mol_type = other DNA
gcagccttgggcccctgccccgtgaagacccacttacctcgccttccagggcccaaggtgggctgggggggcagctgcca

SEQ ID NO: 140452 - DNA, 80 bp, synthetic construct; identical to SEQ ID NO: 43848
  misc_feature 1..80: note = Artificially Synthesized Probe
  source 1..80: mol_type = other DNA

SEQ ID NO: 140453 - DNA, 80 bp, synthetic construct
  misc_feature 1..80: note = Artificially Synthesized Probe
  source 1..80: mol_type = other DNA
gaggggctccccagagaggagagcggccgagcaggcgcgagggtgtggataggcaggtgagtggagggatgagtgagcag

SEQ ID NO: 140454 - DNA, 80 bp, synthetic construct
  misc_feature 1..80: note = Artificially Synthesized Probe
  source 1..80: mol_type = other DNA
ctactggcctgtccagcactcccaccggagatgaggcacaggcaggcaggggactcccagggccagacccccagagcagg

SEQ ID NO: 140455 - DNA, 80 bp, synthetic construct
  misc_feature 1..80: note = Artificially Synthesized Probe
  source 1..80: mol_type = other DNA
gcctggaaggtgagatggggaccagcagcaaggagccggaggacccagggacccctgagaccgggcgctctggtgctacc

SEQ ID NO: 140456 - DNA, 80 bp, synthetic construct
  misc_feature 1..80: note = Artificially Synthesized Probe
  source 1..80: mol_type = other DNA
aacagaggtcccgtggctataaaaagaagcctgcatctacagagaacggccagtggaagggccaagctccacatgggcct

SEQ ID NO: 140457 - DNA, 80 bp, synthetic construct
  misc_feature 1..80: note = Artificially Synthesized Probe
  source 1..80: mol_type = other DNA
cgcccaggaagaaaagccacagggtgtctgggaaggagagaccaaatcactcacggggagaccccagccacgtcacccag

SEQ ID NO: 140458 - DNA, 80 bp, synthetic construct; identical to SEQ ID NO: 43849
  misc_feature 1..80: note = Artificially Synthesized Probe
  source 1..80: mol_type = other DNA

SEQ ID NO: 140459 - DNA, 80 bp, synthetic construct
  misc_feature 1..80: note = Artificially Synthesized Probe
  source 1..80: mol_type = other DNA
ctgaggctgacggggagcagccgcctcgcttggccactctgggacctggggtgatggagggtgcagcggagactgaccag

SEQ ID NO: 140460 - DNA, 80 bp, synthetic construct
  misc_feature 1..80: note = Artificially Synthesized Probe
  source 1..80: mol_type = other DNA
gtgtgtgcaaagagtctgggagcgagcctgcggaggacagcagcagggcccacagccgatcagaggaaggtgtctgggag

SEQ ID NO: 140461 - DNA, 80 bp, synthetic construct; identical to SEQ ID NO: 43850
  misc_feature 1..80: note = Artificially Synthesized Probe
  source 1..80: mol_type = other DNA

SEQ ID NO: 140462 - DNA, 80 bp, synthetic construct
  misc_feature 1..80: note = Artificially Synthesized Probe
  source 1..80: mol_type = other DNA
cgtgggaggacgaggatcccgcaggtctgcccgagtccttcctcctggatgggttcctcaatagcagggtgcctggcatt

SEQ ID NO: 140463 - DNA, 80 bp, synthetic construct
  misc_feature 1..80: note = Artificially Synthesized Probe
  source 1..80: mol_type = other DNA
ctgccgatgactcctcctcttctctcggagatgtgagccccgagccccccagcctggagagagaacgctgtgacggtggg

SEQ ID NO: 140464 - DNA, 80 bp, synthetic construct
  misc_feature 1..80: note = Artificially Synthesized Probe
  source 1..80: mol_type = other DNA
ggctgttcgcagggccagcatcccagccagcggccaaacagagtccacattcatgagcagccattgaggctttcctaccg

SEQ ID NO: 140465 - DNA, 80 bp, synthetic construct
  misc_feature 1..80: note = Artificially Synthesized Probe
  source 1..80: mol_type = other DNA
aggggccacagagccgaaggacagaggaggctgcaggggcagggagggcccaaggcagaggccggccggccaagggcagg

SEQ ID NO: 140466 - DNA, 80 bp, synthetic construct; identical to SEQ ID NO: 43851
  misc_feature 1..80: note = Artificially Synthesized Probe
  source 1..80: mol_type = other DNA

SEQ ID NO: 140467 - DNA, 80 bp, synthetic construct
  misc_feature 1..80: note = Artificially Synthesized Probe
  source 1..80: mol_type = other DNA
ccggcaaggccgccgggagcccgggagacccgtgggggcaagagggagaagccaagaaagacagcccgggcgagagggcg

SEQ ID NO: 140468 - DNA, 80 bp, synthetic construct
  misc_feature 1..80: note = Artificially Synthesized Probe
  source 1..80: mol_type = other DNA
ccaccccggtgcacgaggcctgcaaggacccctcccgcgactgccaccactgcgggaagcgcttccccaagcccttcaag

SEQ ID NO: 140469 - DNA, 80 bp, synthetic construct
  misc_feature 1..80: note = Artificially Synthesized Probe
  source 1..80: mol_type = other DNA
agctctgcgccacggttatgcgcatcatcaagaagtccttcgcctgcagctcctgcaactacaccttcgccaagaaggag

SEQ ID NO: 140470 - DNA, 80 bp, synthetic construct
  misc_feature 1..80: note = Artificially Synthesized Probe
  source 1..80: mol_type = other DNA
ggcccggcgaggacaggcctcctccccggggaagcagccccatcctgagtgagggctctctcccggccctgctccacctg

SEQ ID NO: 140471 - DNA, 80 bp, synthetic construct; identical to SEQ ID NO: 43852
  misc_feature 1..80: note = Artificially Synthesized Probe
  source 1..80: mol_type = other DNA

SEQ ID NO: 140472 - DNA, 80 bp, synthetic construct
  misc_feature 1..80: note = Artificially Synthesized Probe
  source 1..80: mol_type = other DNA
aggtgtgcccctgaccatttccaggaagaccacctacttcagaaagagaaggaggtgtcctcaagccacatggtgtctga

SEQ ID NO: 140473 - DNA, 80 bp, synthetic construct
  misc_feature 1..80: note = Artificially Synthesized Probe
  source 1..80: mol_type = other DNA
gcccgtggcacagagaatgggatgaagcccgccacccccaaagccaaacccggccccagctcccagggcagtggaagccc

SEQ ID NO: 140474 - DNA, 80 bp, synthetic construct; identical to SEQ ID NO: 43853
  misc_feature 1..80: note = Artificially Synthesized Probe
  source 1..80: mol_type = other DNA

SEQ ID NO: 140475 - DNA, 80 bp, synthetic construct; identical to SEQ ID NO: 43799
  misc_feature 1..80: note = Artificially Synthesized Probe
  source 1..80: mol_type = other DNA

SEQ ID NO: 140476 - DNA, 80 bp, synthetic construct
  misc_feature 1..80: note = Artificially Synthesized Probe
  source 1..80: mol_type = other DNA
cccgaccaagcccaagcccaacagccagaacaaacccaggccgccaccatcagagcagcggaaggcagagccgggccaca

SEQ ID NO: 140477 - DNA, 80 bp, synthetic construct
  misc_feature 1..80: note = Artificially Synthesized Probe
  source 1..80: mol_type = other DNA
gagactaactggcttcaaaatccctttaaagaaagatgcttccgagtaatttctaggagcaagagcctgggaccggagct

SEQ ID NO: 140478 - DNA, 80 bp, synthetic construct
  misc_feature 1..80: note = Artificially Synthesized Probe
  source 1..80: mol_type = other DNA
gctggaaggctgggggtgaaagacggggccactgcagcccttttgagaccacacagctgttttcttggtaccaagtactt

SEQ ID NO: 140479 - DNA, 80 bp, synthetic construct; identical to SEQ ID NO: 43854
  misc_feature 1..80: note = Artificially Synthesized Probe
  source 1..80: mol_type = other DNA

SEQ ID NO: 140480 - DNA, 80 bp, synthetic construct
  misc_feature 1..80: note = Artificially Synthesized Probe
  source 1..80: mol_type = other DNA
cgtatggaactgggaagaaaccgcccctgtgccagctcccgcgggccctcctcgttccctcccagcctccatggccgccc

SEQ ID NO: 140481 - DNA, 80 bp, synthetic construct
  misc_feature 1..80: note = Artificially Synthesized Probe
  source 1..80: mol_type = other DNA
caccatggcttgtcgagggcacgggcacctgcatggcggcgctctccctgcctcccctgccgggctgcaagcctgaggtc

SEQ ID NO: 140482 - DNA, 80 bp, synthetic construct
  misc_feature 1..80: note = Artificially Synthesized Probe
  source 1..80: mol_type = other DNA
cccttctctccataagtatcttgaagatccatggtttgttttgctctattgtttagtttttacttgggtgcaatgtgtac

SEQ ID NO: 140483 - DNA, 80 bp, synthetic construct; identical to SEQ ID NO: 43855
  misc_feature 1..80: note = Artificially Synthesized Probe
  source 1..80: mol_type = other DNA

SEQ ID NO: 140484 - DNA, 80 bp, synthetic construct
  misc_feature 1..80: note = Artificially Synthesized Probe
  source 1..80: mol_type = other DNA
ccatctgtagaagccggagagcctggtgccagggccagtctccatactggaggaagctgccccatctgtagaagctgggg

SEQ ID NO: 140485 - DNA, 80 bp, synthetic construct
  misc_feature 1..80: note = Artificially Synthesized Probe
  source 1..80: mol_type = other DNA
tctacagagacagcgataaagctctcgagtcacataaccgctctcctacagtgtgcgcttcagtggctttcaggatattc

SEQ ID NO: 140486 - DNA, 80 bp, synthetic construct; identical to SEQ ID NO: 43800
  misc_feature 1..80: note = Artificially Synthesized Probe
  source 1..80: mol_type = other DNA

SEQ ID NO: 140487 - DNA, 80 bp, synthetic construct
  misc_feature 1..80: note = Artificially Synthesized Probe
  source 1..80: mol_type = other DNA
ttgtgagtccagctgccgtgagcttttgtgtaccgcttctgtgtgggcacccactgtcatctctcctgggcagcttcctg

SEQ ID NO: 140488 - DNA, 80 bp, synthetic construct
  misc_feature 1..80: note = Artificially Synthesized Probe
  source 1..80: mol_type = other DNA
gaccacacgactgggaatggggccaggattcaaactgggaatggggctcaggattccctgagtagggaagtcaaggcaag

SEQ ID NO: 140489 - DNA, 80 bp, synthetic construct
  misc_feature 1..80: note = Artificially Synthesized Probe
  source 1..80: mol_type = other DNA
cccgggccgccccattcatcgcggatcggagccgggggtgccccagccgtgccgccgcctcctccgggccgcccgcccgg

SEQ ID NO: 140490 - DNA, 80 bp, synthetic construct
  misc_feature 1..80: note = Artificially Synthesized Probe
  source 1..80: mol_type = other DNA
cacttacctgtccactctccactctccacatgcagggccaggtgcttcctcaagggagcctggtgaagccgcgagtgagg

SEQ ID NO: 140491 - DNA, 80 bp, synthetic construct; identical to SEQ ID NO: 43801
  misc_feature 1..80: note = Artificially Synthesized Probe
  source 1..80: mol_type = other DNA

SEQ ID NO: 140492 - DNA, 80 bp, synthetic construct
  misc_feature 1..80: note = Artificially Synthesized Probe
  source 1..80: mol_type = other DNA
tggctccaaccccaccgaggtcagggcacctgtccagagcctacccagtggggagcagtcagaggggttgggggaggcag

SEQ ID NO: 140493 - DNA, 80 bp, synthetic construct
  misc_feature 1..80: note = Artificially Synthesized Probe
  source 1..80: mol_type = other DNA
gctgacttttcctgcactgtcagctactctcagctggagaaaacaggaagcagggacggccacagtgctaacattcggat

SEQ ID NO: 140494 - DNA, 80 bp, synthetic construct
  misc_feature 1..80: note = Artificially Synthesized Probe
  source 1..80: mol_type = other DNA
ccagatgggagagggaatccccaggttctccaagcatgccagatgggagaggacatccccagcaaaggaagcagcatagg

SEQ ID NO: 140495 - DNA, 80 bp, synthetic construct; identical to SEQ ID NO: 43802
  misc_feature 1..80: note = Artificially Synthesized Probe
  source 1..80: mol_type = other DNA

SEQ ID NO: 140496 - DNA, 80 bp, synthetic construct
  misc_feature 1..80: note = Artificially Synthesized Probe
  source 1..80: mol_type = other DNA
agcacacagggctgggattcaaagctgccacctcttgcttggcagaagggacagagccaggacagttgctccatgtgact

SEQ ID NO: 140497 - DNA, 80 bp, synthetic construct
  misc_feature 1..80: note = Artificially Synthesized Probe
  source 1..80: mol_type = other DNA
tggtgtcctcttcatcaagtggagggctgagtggtccccacaggcacaggcccaatgcctcgggatcgggagcctctgac

SEQ ID NO: 140498 - DNA, 80 bp, synthetic construct
  misc_feature 1..80: note = Artificially Synthesized Probe
  source 1..80: mol_type = other DNA
ctgactgaacttttctgtaacatctcttggctggaaatttttatgagcattttgaaccctgtgcaggcaggctgggtttg

SEQ ID NO: 140499 - DNA, 80 bp, synthetic construct
  misc_feature 1..80: note = Artificially Synthesized Probe
  source 1..80: mol_type = other DNA
atacattatatcacataacatcatacaatatcttatgcaggctacaaactcaagctacccaagtgattttggagccacat

SEQ ID NO: 140500 - DNA, 80 bp, synthetic construct; identical to SEQ ID NO: 43803
  misc_feature 1..80: note = Artificially Synthesized Probe
  source 1..80: mol_type = other DNA

SEQ ID NO: 140501 - DNA, 80 bp, synthetic construct; identical to SEQ ID NO: 43794
  misc_feature 1..80: note = Artificially Synthesized Probe
  source 1..80: mol_type = other DNA

SEQ ID NO: 140502 - DNA, 80 bp, synthetic construct
  misc_feature 1..80: note = Artificially Synthesized Probe
  source 1..80: mol_type = other DNA
tagcgtaggtgcctcctccccagcccagccttctcacgcctgacagccttctctgttttctccgggaagccacacccgac

SEQ ID NO: 140503 - DNA, 80 bp, synthetic construct
  misc_feature 1..80: note = Artificially Synthesized Probe
  source 1..80: mol_type = other DNA
ctggtgatttttatgttgagctttcagacccttgtaaagcctcatctctttgtccctagatgctatgtttcaggcacctg

SEQ ID NO: 140504 - DNA, 80 bp, synthetic construct
  misc_feature 1..80: note = Artificially Synthesized Probe
  source 1..80: mol_type = other DNA
tccaacatcgccctgcctttcctctgagaaggtctcccttccccggcaggttccctccccaacctcccttgctccttgta

SEQ ID NO: 140505 - DNA, 80 bp, synthetic construct
  misc_feature 1..80: note = Artificially Synthesized Probe
  source 1..80: mol_type = other DNA
aaaatttttaaatttattgcattttattacataaacgtacaattgataaaaaacaatctctcctatctctgatgaaacaa

SEQ ID NO: 140506 - DNA, 80 bp, synthetic construct
  misc_feature 1..80: note = Artificially Synthesized Probe
  source 1..80: mol_type = other DNA
ggacacatttttattatgtgctgatgcacacacaacacaacatcactgctgtggcatttctctcctctcagaaaagtaaa

SEQ ID NO: 140507 - DNA, 80 bp, synthetic construct
  misc_feature 1..80: note = Artificially Synthesized Probe
  source 1..80: mol_type = other DNA
tcaacctcccaagtagctgggattacaggtgcatgcaccatgcctggctaatttttgtatttttttttagtagagatgtt

SEQ ID NO: 140508 - DNA, 80 bp, synthetic construct; identical to SEQ ID NO: 43867
  misc_feature 1..80: note = Artificially Synthesized Probe
  source 1..80: mol_type = other DNA

SEQ ID NO: 140509 - DNA, 80 bp, synthetic construct
  misc_feature 1..80: note = Artificially Synthesized Probe
  source 1..80: mol_type = other DNA
ccccaatagaaatcttgagtatccacaccttctaatgttcaacagctacaatgggaacattttaaatatcgtaggtcata

SEQ ID NO: 140510 - DNA, 80 bp, synthetic construct
  misc_feature 1..80: note = Artificially Synthesized Probe
  source 1..80: mol_type = other DNA
acaagtagagaagtaaaaatttgcaagatctgaacacaaggcattccaaaaggcagcagtggacactgcgcttgatctga

SEQ ID NO: 140511 - DNA, 80 bp, synthetic construct
  misc_feature 1..80: note = Artificially Synthesized Probe
  source 1..80: mol_type = other DNA
aaagaccgagacttgcagaaaacattcacccatttttgttgtttataactgaaaagatttaagagcaatgagagaacaac

SEQ ID NO: 140512 - DNA, 80 bp, synthetic construct; identical to SEQ ID NO: 43857
  misc_feature 1..80: note = Artificially Synthesized Probe
  source 1..80: mol_type = other DNA

SEQ ID NO: 140513 - DNA, 80 bp, synthetic construct
  misc_feature 1..80: note = Artificially Synthesized Probe
  source 1..80: mol_type = other DNA
ttgaactaaactctcctgaaagtatcttgaacccctcaagtttataaatcacttggtaatcttggccccgctctatgcaa

SEQ ID NO: 140514 - DNA, 80 bp, synthetic construct; identical to SEQ ID NO: 43868
  misc_feature 1..80: note = Artificially Synthesized Probe
  source 1..80: mol_type = other DNA

SEQ ID NO: 140515 - DNA, 80 bp, synthetic construct
  misc_feature 1..80: note = Artificially Synthesized Probe
  source 1..80: mol_type = other DNA
ctgggagttggtactaagtgctgaataatttttagcatttggattaagagcacagcatttttatttcttcttatctttct

SEQ ID NO: 140516 - DNA, 80 bp, synthetic construct
  misc_feature 1..80: note = Artificially Synthesized Probe
  source 1..80: mol_type = other DNA
tacaacataccagaatctcagggttagagctaaggcagtgttaaggacaaaatgtatatcactaaacatccacatcaaaa

SEQ ID NO: 140517 - DNA, 80 bp, synthetic construct
  misc_feature 1..80: note = Artificially Synthesized Probe
  source 1..80: mol_type = other DNA
gttcaatgggccacgcatgtgctgtggcttgctcctgtaatcccagcactttgggaggccagggcgggaagatcacgagt

SEQ ID NO: 140518 - DNA, 80 bp, synthetic construct; identical to SEQ ID NO: 43869
  misc_feature 1..80: note = Artificially Synthesized Probe
  source 1..80: mol_type = other DNA

SEQ ID NO: 140519 - DNA, 80 bp, synthetic construct
  misc_feature 1..80: note = Artificially Synthesized Probe
  source 1..80: mol_type = other DNA
tgctgctggtgagagtataaatttatttaaccattgagaaaagcagtttggcattttgacaaaaacctgaaaacagaatt

SEQ ID NO: 140520 - DNA, 80 bp, synthetic construct
  misc_feature 1..80: note = Artificially Synthesized Probe
  source 1..80: mol_type = other DNA
agaaaacgtcgtatgtaaacaccacgaaatatgatgcactataagaaagaacaacatcatgtcctttgcagcaatgtcga

SEQ ID NO: 140521 - DNA, 80 bp, synthetic construct; identical to SEQ ID NO: 43870
  misc_feature 1..80: note = Artificially Synthesized Probe
  source 1..80: mol_type = other DNA

SEQ ID NO: 140522 - DNA, 80 bp, synthetic construct
  misc_feature 1..80: note = Artificially Synthesized Probe
  source 1..80: mol_type = other DNA
ccaaaagttggagacctacctggccaacatggtgaaatcctgtctctactaaaaatacaaaaattagttgggcctggtgg

SEQ ID NO: 140523 - DNA, 80 bp, synthetic construct
  misc_feature 1..80: note = Artificially Synthesized Probe
  source 1..80: mol_type = other DNA
taaagggtttgccacatttttttctgcaattgcagggtttctctccaatatcaattatcttacatttattcaggtttgag

SEQ ID NO: 140524 - DNA, 80 bp, synthetic construct
  misc_feature 1..80: note = Artificially Synthesized Probe
  source 1..80: mol_type = other DNA
ttcttgtaaattactatcttgaagaaaatatttggcctaggcaaccacagactgccaattaatctctgatgacataacca

SEQ ID NO: 140525 - DNA, 80 bp, synthetic construct
  misc_feature 1..80: note = Artificially Synthesized Probe
  source 1..80: mol_type = other DNA
ttgaatcacactttgatcagattctcatttttacagtgactcccatacatctctaaaaggaaaaatgaggaactaaggac

SEQ ID NO: 140526 - DNA, 80 bp, synthetic construct
  misc_feature 1..80: note = Artificially Synthesized Probe
  source 1..80: mol_type = other DNA
ctgcagaggaaaaagacaaaaaccccagggtgccaggtgctggcccaggcaccatcttgcggctggaggggacgagagcc

SEQ ID NO: 140527 - DNA, 80 bp, synthetic construct; identical to SEQ ID NO: 43871
  misc_feature 1..80: note = Artificially Synthesized Probe
  source 1..80: mol_type = other DNA

SEQ ID NO: 140528 - DNA, 80 bp, synthetic construct
  misc_feature 1..80: note = Artificially Synthesized Probe
  source 1..80: mol_type = other DNA
aaggtttcaggccccacccttcatgccctgagtgagggaatatttgatcagacactgggctgagtgaagcaaaaataaca

SEQ ID NO: 140529 - DNA, 80 bp, synthetic construct
  misc_feature 1..80: note = Artificially Synthesized Probe
  source 1..80: mol_type = other DNA
attttaaaatgtaggattttatgaccttccttgctgcggatcctttgcagtgacatggtgtgtctttctggctccaccca

SEQ ID NO: 140530 - DNA, 80 bp, synthetic construct
  misc_feature 1..80: note = Artificially Synthesized Probe
  source 1..80: mol_type = other DNA
caaaaattagcctggcgtggcagtgtgcctgtagtcccggctactcgggagactgaggcaggagaattgcttgaacccag

SEQ ID NO: 140531 - DNA, 80 bp, synthetic construct; identical to SEQ ID NO: 43872
  misc_feature 1..80: note = Artificially Synthesized Probe
  source 1..80: mol_type = other DNA

SEQ ID NO: 140532 - DNA, 80 bp, synthetic construct
  misc_feature 1..80: note = Artificially Synthesized Probe
  source 1..80: mol_type = other DNA
actaatacatgcgggcagcctgagatttcaaaagggaggaaatcctctgcagtaaaatataagccacatgtaaattttga

SEQ ID NO: 140533 - DNA, 80 bp, synthetic construct
  misc_feature 1..80: note = Artificially Synthesized Probe
  source 1..80: mol_type = other DNA
accaaaagtagaaaaattagctgggcgtggtgacaggcatctgcaatctcagctactagggaggctgagacaggagaatt

SEQ ID NO: 140534 - DNA, 80 bp, synthetic construct
  misc_feature 1..80: note = Artificially Synthesized Probe
  source 1..80: mol_type = other DNA
ctgagatgtgcttaaaggttttgtcactttttttatgtttctagggtctctgtaatataagttctcttaggctttgggag

SEQ ID NO: 140535 - DNA, 80 bp, synthetic construct
  misc_feature 1..80: note = Artificially Synthesized Probe
  source 1..80: mol_type = other DNA
atatccaaattattattattttaatatgtgattagcatgtaatggttaataaagcatatacatttttgaagctaaatctt

SEQ ID NO: 140536 - DNA, 80 bp, synthetic construct; identical to SEQ ID NO: 43873
  misc_feature 1..80: note = Artificially Synthesized Probe
  source 1..80: mol_type = other DNA

SEQ ID NO: 140537 - DNA, 80 bp, synthetic construct
  misc_feature 1..80: note = Artificially Synthesized Probe
  source 1..80: mol_type = other DNA
agagagttaccttacatggtctaaaaagaagagaaacacccagttctggaaattgcccatgcctttcttgtaaaactcat

SEQ ID NO: 140538 - DNA, 80 bp, synthetic construct
  misc_feature 1..80: note = Artificially Synthesized Probe
  source 1..80: mol_type = other DNA
attctttcttctatctttttttttttttttttttttgtctttgagacagcatcctgctctgtcacccaggctggagtgca

SEQ ID NO: 140539 - DNA, 80 bp, synthetic construct
  misc_feature 1..80: note = Artificially Synthesized Probe
  source 1..80: mol_type = other DNA
tctcgaactcctgacctcaagtgatcctcccgcctctgcctcccaaattgccggggttacaggcataagccagggttata

SEQ ID NO: 140540 - DNA, 80 bp, synthetic construct; identical to SEQ ID NO: 43874
  misc_feature 1..80: note = Artificially Synthesized Probe
  source 1..80: mol_type = other DNA

SEQ ID NO: 140541 - DNA, 80 bp, synthetic construct
  misc_feature 1..80: note = Artificially Synthesized Probe
  source 1..80: mol_type = other DNA
agattgggcattatggaatgttaaccattgctgtctttgtgtttgtttgtttgtttttttgtttgttttgagatagagtc

SEQ ID NO: 140542 - DNA, 80 bp, synthetic construct
  misc_feature 1..80: note = Artificially Synthesized Probe
  source 1..80: mol_type = other DNA
tggggtttcaccatgttggccaggctggtcttgaactcctgacctcagctgatccacctgcctcagcctcccaaagtgct

SEQ ID NO: 140543 - DNA, 80 bp, synthetic construct
  misc_feature 1..80: note = Artificially Synthesized Probe
  source 1..80: mol_type = other DNA
actgcaaaaaagattctttcacaaccaacaagcagccacctaaacttttgattcagtgcaatgcttgggtctttctctgg

SEQ ID NO: 140544 - DNA, 80 bp, synthetic construct; identical to SEQ ID NO: 43875
  misc_feature 1..80: note = Artificially Synthesized Probe
  source 1..80: mol_type = other DNA

SEQ ID NO: 140545 - DNA, 80 bp, synthetic construct
  misc_feature 1..80: note = Artificially Synthesized Probe
  source 1..80: mol_type = other DNA
cgcttgaacccggaaggcagaggttacagtgagctgagatcatgacactgcactccagcctgggtgacacagggagactc

SEQ ID NO: 140546 - DNA, 80 bp, synthetic construct
  misc_feature 1..80: note = Artificially Synthesized Probe
  source 1..80: mol_type = other DNA
ttgcagtgagctgagttcacgctactgcactccagcctgggagacagagcaagactccatctcaaaaaaaaaataccccc

SEQ ID NO: 140547 - DNA, 80 bp, synthetic construct
  misc_feature 1..80: note = Artificially Synthesized Probe
  source 1..80: mol_type = other DNA
tttatgttatacttaactctaaaaatgatcttgagcagttaaaaacctttgcaagctcaaaattggctgctggaggcttc

SEQ ID NO: 140548 - DNA, 80 bp, synthetic construct
  misc_feature 1..80: note = Artificially Synthesized Probe
  source 1..80: mol_type = other DNA
ccaccaaccatcttggattttcctttttctgagctacctttgaagattccagatttgtaaaactgcttgccacctttttg

SEQ ID NO: 140549 - DNA, 80 bp, synthetic construct; identical to SEQ ID NO: 43876
  misc_feature 1..80: note = Artificially Synthesized Probe
  source 1..80: mol_type = other DNA

SEQ ID NO: 140550 - DNA, 80 bp, synthetic construct
  misc_feature 1..80: note = Artificially Synthesized Probe
  source 1..80: mol_type = other DNA
gagtagctgggattacaggcatccaccactacacctggctgctatttgtattttttgtatttttactaaatactaaaaaa

SEQ ID NO: 140551 - DNA, 80 bp, synthetic construct
  misc_feature 1..80: note = Artificially Synthesized Probe
  source 1..80: mol_type = other DNA
ctaacagcctggaactcctttgaaaaaacagaggaggtgccacaataggcattttcggtgcaactcaaaggaagtattga

SEQ ID NO: 140552 - DNA, 80 bp, synthetic construct
  misc_feature 1..80: note = Artificially Synthesized Probe
  source 1..80: mol_type = other DNA
tgtgaaatattcttaggttgagcacctagataatgtgactttcctgcttgggctctgccctcccagggtattgtgacata

SEQ ID NO: 140553 - DNA, 80 bp, synthetic construct; identical to SEQ ID NO: 43877
  misc_feature 1..80: note = Artificially Synthesized Probe
  source 1..80: mol_type = other DNA

SEQ ID NO: 140554 - DNA, 80 bp, synthetic construct
  misc_feature 1..80: note = Artificially Synthesized Probe
  source 1..80: mol_type = other DNA
ggtataatgaagactcacatatgtgaacccagccagtagaagacattttaactcttctagctaggcttagaaaaacaggc

SEQ ID NO: 140555 - DNA, 80 bp, synthetic construct; identical to SEQ ID NO: 43858
  misc_feature 1..80: note = Artificially Synthesized Probe
  source 1..80: mol_type = other DNA

SEQ ID NO: 140556 - DNA, 80 bp, synthetic construct
  misc_feature 1..80: note = Artificially Synthesized Probe
  source 1..80: mol_type = other DNA
cttcctcacacattgacaaaacttattggtgaagtcttgactctcatatgaggacacgatacacagttagaatattgacc

SEQ ID NO: 140557 - DNA, 80 bp, synthetic construct
  misc_feature 1..80: note = Artificially Synthesized Probe
  source 1..80: mol_type = other DNA
aagaaaaatcacaggtgattaccacacacatgcatgttgtgtaaagccctcagatggtacagagagtgtcataataagac

SEQ ID NO: 140558 - DNA, 80 bp, synthetic construct
  misc_feature 1..80: note = Artificially Synthesized Probe
  source 1..80: mol_type = other DNA
ggatgttgaccaatttctgtaaccagatcacaggaacaaaaatgactctcctacctggaaccaaaaataggagagatgtt

SEQ ID NO: 140559 - DNA, 80 bp, synthetic construct; identical to SEQ ID NO: 43878
  misc_feature 1..80: note = Artificially Synthesized Probe
  source 1..80: mol_type = other DNA

SEQ ID NO: 140560 - DNA, 80 bp, synthetic construct
  misc_feature 1..80: note = Artificially Synthesized Probe
  source 1..80: mol_type = other DNA
ctctcatgcacacagccagtccactgttgaggttgtgagtcaaatacttaaccatatctcgcaagatatgttgactgtca

SEQ ID NO: 140561 - DNA, 80 bp, synthetic construct
  misc_feature 1..80: note = Artificially Synthesized Probe
  source 1..80: mol_type = other DNA
tgattaattttactctgttgcttgggcccagtgtacagttgagattgtcacatatacctgggccatgcagtatattcagt

SEQ ID NO: 140562 - DNA, 80 bp, synthetic construct; identical to SEQ ID NO: 43879
  misc_feature 1..80: note = Artificially Synthesized Probe
  source 1..80: mol_type = other DNA

SEQ ID NO: 140563 - DNA, 80 bp, synthetic construct; identical to SEQ ID NO: 43856
  misc_feature 1..80: note = Artificially Synthesized Probe
  source 1..80: mol_type = other DNA

SEQ ID NO: 140564 - DNA, 80 bp, synthetic construct
  misc_feature 1..80: note = Artificially Synthesized Probe
  source 1..80: mol_type = other DNA
ttaaaggctttgccacattcttcacatgtgtagggtctctctccagtatgaattctcttgtggtcagtgagggttgagga

SEQ ID NO: 140565 - DNA, 80 bp, synthetic construct
  misc_feature 1..80: note = Artificially Synthesized Probe
  source 1..80: mol_type = other DNA
gctgaggagcgcctaaagtcttggccacattcttcacatgtgtagggtttctctccagtatgaattctcctatgtctcat

SEQ ID NO: 140566 - DNA, 80 bp, synthetic construct
  misc_feature 1..80: note = Artificially Synthesized Probe
  source 1..80: mol_type = other DNA
tggtcagtgagggttgaggatacgctaaaggctttgccacattcttcacatttgtagggtctctctccagtatgaattct

SEQ ID NO: 140567 - DNA, 80 bp, synthetic construct; identical to SEQ ID NO: 43859
  misc_feature 1..80: note = Artificially Synthesized Probe
  source 1..80: mol_type = other DNA

SEQ ID NO: 140568 - DNA, 80 bp, synthetic construct
  misc_feature 1..80: note = Artificially Synthesized Probe
  source 1..80: mol_type = other DNA
ttgttttgggtagttgacaaacattggttaacttcactataacctcccttgtgcacctcatattcacccacacttttaca

SEQ ID NO: 140569 - DNA, 80 bp, synthetic construct
  misc_feature 1..80: note = Artificially Synthesized Probe
  source 1..80: mol_type = other DNA
ccactttctggactcatataaatatattctacacatgaaatatataaaattacacaaggtacattagcaaaatgccatat

SEQ ID NO: 140570 - DNA, 80 bp, synthetic construct
  misc_feature 1..80: note = Artificially Synthesized Probe
  source 1..80: mol_type = other DNA
ttacccaacacagcccttcctcatgcccagtagaagaacatagtgcctttaataacagctttaagtcttctgagctcaaa

SEQ ID NO: 140571 - DNA, 80 bp, synthetic construct; identical to SEQ ID NO: 43860
  misc_feature 1..80: note = Artificially Synthesized Probe
  source 1..80: mol_type = other DNA

SEQ ID NO: 140572 - DNA, 80 bp, synthetic construct
  misc_feature 1..80: note = Artificially Synthesized Probe
  source 1..80: mol_type = other DNA
taatccatattatgctcaatgagaaaaatggaaaaccagacacccaaataaaataagaaaaataagaataccaacaaaac

SEQ ID NO: 140573 - DNA, 80 bp, synthetic construct
  misc_feature 1..80: note = Artificially Synthesized Probe
  source 1..80: mol_type = other DNA
caaaagtcacaaaccagaagataatcttgggagctgcaagataaaagtgaggtattatttataagcatagtcctctgaga

SEQ ID NO: 140574 - DNA, 80 bp, synthetic construct
  misc_feature 1..80: note = Artificially Synthesized Probe
  source 1..80: mol_type = other DNA
ttcattacatgtttagactttctctccaatataaattctctaatgttcaacaaagtttgagcatcttctcagatcttcaa

SEQ ID NO: 140575 - DNA, 80 bp, synthetic construct
  misc_feature 1..80: note = Artificially Synthesized Probe
  source 1..80: mol_type = other DNA
aaatgctggcacataatcattgtatgtgccctaaataaaatgctgaaaagaggtctttccacttaaaataacatgatgaa

SEQ ID NO: 140576 - DNA, 80 bp, synthetic construct
  misc_feature 1..80: note = Artificially Synthesized Probe
  source 1..80: mol_type = other DNA
cataaaaagatataattagcaacatcaataagaagtatggggtagatataatgaggacaaatttttctatgcaactgaag

SEQ ID NO: 140577 - DNA, 80 bp, synthetic construct; identical to SEQ ID NO: 43861
  misc_feature 1..80: note = Artificially Synthesized Probe
  source 1..80: mol_type = other DNA

SEQ ID NO: 140578 - DNA, 80 bp, synthetic construct
  misc_feature 1..80: note = Artificially Synthesized Probe
  source 1..80: mol_type = other DNA
tgaatttattttgcattgccatagaaaataacctcagactgggtaattcataaagaaaaagatttttttgattcacagtt

SEQ ID NO: 140579 - DNA, 80 bp, synthetic construct
  misc_feature 1..80: note = Artificially Synthesized Probe
  source 1..80: mol_type = other DNA
gcaaccagctctcatgtgaattagtagagtgagaactctatgattgtgccaagtcattcatgaggggatttgtctccatg

SEQ ID NO: 140580 - DNA, 80 bp, synthetic construct
  misc_feature 1..80: note = Artificially Synthesized Probe
  source 1..80: mol_type = other DNA
tacacaatattcttatttgcacctggtgcgttctgttagaacacataagtcttggtaaatttcaaaagatcagccaggtg

SEQ ID NO: 140581 - DNA, 80 bp, synthetic construct; identical to SEQ ID NO: 43862
  misc_feature 1..80: note = Artificially Synthesized Probe
  source 1..80: mol_type = other DNA

SEQ ID NO: 140582 - DNA, 80 bp, synthetic construct
  misc_feature 1..80: note = Artificially Synthesized Probe
  source 1..80: mol_type = other DNA
aataaacacactcttcactgtattcttgcacagggtcaaataatttaaattaatttaatattttttctcaagggccaaca

SEQ ID NO: 140583 - DNA, 80 bp, synthetic construct
  misc_feature 1..80: note = Artificially Synthesized Probe
  source 1..80: mol_type = other DNA
aaacacacatgaaaaacacagaggcactatacttcataatttcaaaacataataaaaagctgcaataacaataactatgt

SEQ ID NO: 140584 - DNA, 80 bp, synthetic construct; identical to SEQ ID NO: 43863
  misc_feature 1..80: note = Artificially Synthesized Probe
  source 1..80: mol_type = other DNA

SEQ ID NO: 140585 - DNA, 80 bp, synthetic construct
  misc_feature 1..80: note = Artificially Synthesized Probe
  source 1..80: mol_type = other DNA
catttataattttttttttgagacagagtcttgctctgtcacccaggctgtagtgtagtggctctatctcagctcactgc

SEQ ID NO: 140586 - DNA, 80 bp, synthetic construct
  misc_feature 1..80: note = Artificially Synthesized Probe
  source 1..80: mol_type = other DNA
ctgcaatcaaataaaacatttaatacagtgacagtgtctcccaagaaatcggtgacaatatttgaaaatcacatgtgata

SEQ ID NO: 140587 - DNA, 80 bp, synthetic construct
  misc_feature 1..80: note = Artificially Synthesized Probe
  source 1..80: mol_type = other DNA
ggtcaggaattcaagaccagcctgaccaacatggtgaaacccaccactactataaatacaaaattagctgggtgtggtgg

SEQ ID NO: 140588 - DNA, 80 bp, synthetic construct
  misc_feature 1..80: note = Artificially Synthesized Probe
  source 1..80: mol_type = other DNA
aaatgattaaactaaattttaataaaaaagatatacaaatgggaagaagcatttgaaaggttgcacaaaattaataattt

SEQ ID NO: 140589 - DNA, 80 bp, synthetic construct
  misc_feature 1..80: note = Artificially Synthesized Probe
  source 1..80: mol_type = other DNA
agccatcataaaaacatcataagcgttctttaaataatctaaaatgaaattattatataatacagcaataccatttatga

SEQ ID NO: 140590 - DNA, 80 bp, synthetic construct; identical to SEQ ID NO: 43864
  misc_feature 1..80: note = Artificially Synthesized Probe
  source 1..80: mol_type = other DNA

SEQ ID NO: 140591 - DNA, 80 bp, synthetic construct
  misc_feature 1..80: note = Artificially Synthesized Probe
  source 1..80: mol_type = other DNA
tggctcacactgtgaacttgaagaaagattattgaagcagaagtggaatccttagagactttaacagcatgaggcaggag

SEQ ID NO: 140592 - DNA, 80 bp, synthetic construct
  misc_feature 1..80: note = Artificially Synthesized Probe
  source 1..80: mol_type = other DNA
cacctacctgggtgtttggctaccatctcatttctctttatattctgggactctttattttgctccagacaggtgatcaa

SEQ ID NO: 140593 - DNA, 80 bp, synthetic construct
  misc_feature 1..80: note = Artificially Synthesized Probe
  source 1..80: mol_type = other DNA
agaactttctaaatattcagaaaatattttaaatttgtaggtccttaatttcactactcagtactactgaatcaaaaatt

SEQ ID NO: 140594 - DNA, 80 bp, synthetic construct
  misc_feature 1..80: note = Artificially Synthesized Probe
  source 1..80: mol_type = other DNA
agcaatgaatccccaagattttcttaaaattggagatctaaaattcattcatgcaaagcagaaattaccaaaaacatctt

SEQ ID NO: 140595 - DNA, 80 bp, synthetic construct; identical to SEQ ID NO: 43865
  misc_feature 1..80: note = Artificially Synthesized Probe
  source 1..80: mol_type = other DNA

SEQ ID NO: 140596 - DNA, 80 bp, synthetic construct
  misc_feature 1..80: note = Artificially Synthesized Probe
  source 1..80: mol_type = other DNA
acctcatgatccaccgaccttggtctcccaaagtgctggaattataggcatgagccaacacacctgacctataatccctt

SEQ ID NO: 140597 - DNA, 80 bp, synthetic construct
  misc_feature 1..80: note = Artificially Synthesized Probe
  source 1..80: mol_type = other DNA
gaaaagaggatagcataagatccacaatactgctgtagatttgatacttttctggatgatacattataaaattaagggca

SEQ ID NO: 140598 - DNA, 80 bp, synthetic construct
  misc_feature 1..80: note = Artificially Synthesized Probe
  source 1..80: mol_type = other DNA
tcctgcctcagcctcctgggtagctgggactacaggcatgagccaccatgactggctaatttttgtatttttagtagaga

SEQ ID NO: 140599 - DNA, 80 bp, synthetic construct
  misc_feature 1..80: note = Artificially Synthesized Probe
  source 1..80: mol_type = other DNA
agaataagttgtgtatatttctcagatagaacagtcatgatgagttggaagatacctctcaagtcttagtatgtgcaata

SEQ ID NO: 140600 - DNA, 80 bp, synthetic construct; identical to SEQ ID NO: 43866
  misc_feature 1..80: note = Artificially Synthesized Probe
  source 1..80: mol_type = other DNA
